(19) United States
(12) Patent Application Publication
(10) Pub. No.: US 2010/0247528 A1
(43) Pub. Date: Sep. 30, 2010

(54) ARRAYS, KITS AND CANCER CHARACTERIZATION METHODS

(76) Inventors: Kent Hunter, Potomac, MD (US); Nigel Crawford, N. Bethesda, MD (US)

Correspondence Address: LEYDIG, VOIT & MAYER, LTD., TWO PRUDENTIAL PLAZA, SUITE 4900, 180 NORTH STETSON AVENUE, CHICAGO, IL, 60601-6731, US

(21) Appl. No.: 12/676,693

(22) PCT Filed: Sep. 4, 2008
(86) PCT No.: PCT/US2008/075242

§ 371 Date: Mar. 24, 2010

Related U.S. Application Data
(60) Provisional application No. 60/970,400, filed on Sep. 6, 2007.

(51) Int. Cl. A61K 38/02; C40B 40/06; C40B 40/10; C40B 30/00; A61K 38/46; A61K 31/255; A61K 31/282; A61K 33/24; A61K 31/704; A61K 31/513; A61K 31/7068; A61K 31/17; A61K 31/4985; A61K 31/337; A61K 39/395; A61K 31/437; A61P 35/00

(52) U.S. Cl. 424/133.1; 506/16; 506/18; 506/7; 514/19.3; 424/94.6; 514/517; 514/492; 424/649; 514/34; 514/274; 514/49; 514/588; 514/249; 514/449; 514/281

(57) ABSTRACT

The invention provides an array comprising a substrate and a set of addressable elements, wherein each addressable element comprises (i) a polynucleotide that specifically binds to a target molecule, (ii) a polypeptide that specifically binds to target molecule, or (iii) a combination of (i) and (ii), wherein the target molecule is selected from the group of cancer-related target molecules as defined herein. Related kits, methods, and uses as described herein are further provided by the invention.

### CROSS-REFERENCE TO RELATED APPLICATIONS

[0001] This patent application claims the benefit of U.S. Provisional Patent Application No. 60/970,400, filed Sep. 6, 2007, which is incorporated by reference.

### BACKGROUND OF THE INVENTION

[0002] The process of metastasis is of great importance to the clinical management of cancer since the majority of cancer mortality is associated with metastatic disease rather than the primary tumor (Liotta et al., Principles of molecular cell biology of cancer: Cancer metastasis (4th ed.), Cancer: Principles & Practice of Oncology, ed. S. H. V. DeVita and S. A. Rosenberg, Philadelphia, Pa.: J. B. Lippincott Co., 134-149 (1993)). In most cases, cancer patients with localized tumors have significantly better prognoses than those with disseminated tumors. Since recent evidence suggests that the first stages of metastasis can be an early event (Schmidt-Kittler et al., Proc. Natl. Acad. Sci. U.S.A., 100 (13): 7737-7742 (2003)) and that 60-70% of patients have initiated the metastatic process by the time of diagnosis, a better understanding of the factors leading to tumor dissemination is of vital importance. However, even patients that have no evidence of tumor dissemination at primary diagnosis are at risk for metastatic disease. Approximately one-third of women who are sentinel lymph node negative at the time of surgical resection of the primary breast tumor will subsequently develop clinically detectable secondary tumors (Heimann et al., Cancer Res., 60 (2): 298-304 (2000)). Even patients with small primary tumors and node negative status (T1N0) at surgery have a significant chance (15-25%) of developing distant metastases (Heimann et al., J. Clin. Oncol., 18 (3): 591-599 (2000)). The foregoing shows that there is a need for a method of characterizing a tumor or a cancer in a subject, especially in terms of the metastatic capacity of a tumor.

### BRIEF SUMMARY OF THE INVENTION

[0003] The invention provides an array comprising a substrate and a set of addressable elements, wherein each addressable element comprises (i) a polynucleotide that specifically binds to a target molecule, (ii) a polypeptide that specifically binds to a target molecule, or (iii) a combination of (i) and (ii), wherein the target molecule is selected from the group of target molecules as defined herein, wherein the array comprises less than 38,500 addressable elements.

[0004] The invention also provides a kit comprising a set of user instructions and (i) a set of polynucleotides, (ii) a set of polypeptides, or (iii) a combination of (i) and (ii), wherein the set of polynucleotides is specific for one or more of the target molecules selected from the group of target molecules as defined herein, wherein the set of polypeptides is specific for the target molecules selected from the group as defined herein.

[0005] The invention further provides a method of characterizing a tumor or cancer in a subject comprising (i) detecting the expression levels of a set of target molecules in the subject and (ii) comparing the expression level of the set of target molecules to a control set of expression levels. In a first embodiment of the inventive method, the set of target molecules comprises one or more of the target molecules selected from the group as defined herein and the expression level is detected with the array or kit of the invention. In a second embodiment of the inventive method, the set of addressable elements consists essentially of the addressable elements that are specific for the target molecules described herein.

[0006] Further provided is the use of a compound with anti-cancer activity for the preparation of a medicament to treat cancer in a subject for whom the expression levels of a set of target molecules are determined. In a first embodiment of the inventive use, the set of target molecules comprises one or more of the target molecules described herein and the expression levels are determined with the array or kit of the invention. In a second embodiment of the inventive use, the set of addressable elements consists essentially of the addressable elements that are specific for the target molecules described herein.

### BRIEF DESCRIPTION OF THE SEVERAL VIEWS OF THE DRAWING(S)

[0007] FIG. 1A is a Kaplan Meier Curve of the Cox proportional analysis of the Mvt-1/Brd4 microarray gene expression signature on the GSE1456 breast cancer cohort in terms of overall survival.

[0008] FIG. 1B is a Kaplan Meier Curve of the Cox proportional analysis of the Mvt-1/Brd4 microarray gene expression signature on the GSE3494 breast cancer cohort in terms of overall survival.

[0009] FIG. 1C is a Kaplan Meier Curve of the Cox proportional analysis of the Mvt-1/Brd4 microarray gene expression signature on the GSE2034 breast cancer cohort in terms of overall survival.

[0010] FIG. 1D is a Kaplan Meier Curve of the Cox proportional analysis of the Mvt-1/Brd4 microarray gene expression signature on the GSE4922 breast cancer cohort in terms of overall survival.

[0011] FIG. 1E is a Kaplan Meier Curve of the Cox proportional analysis of the Mvt-1/Brd4 microarray gene expression signature on the Rosetta breast cancer cohort (van 't Veer et al., Nature 415: 530-536 (2002)) in terms of overall survival.

[0012] FIG. 1F is a Kaplan Meier Curve of the Cox proportional analysis of the van't Veer gene expression signature described in van't Veer et al., Nature 415: 530-536 (2002) on the Rosetta breast cancer cohort in terms of overall survival.

[0013] FIG. 2A is a Kaplan Meier Curve of the Cox proportional analysis of the Mvt-1/Brd4 microarray gene expression signature on the lymph node-negative patients of the GSE3494 breast cancer cohort.

[0014] FIG. 2B is a Kaplan Meier Curve of the Cox proportional analysis of the Mvt-1/Brd4 microarray gene expression signature on the lymph node-negative patients of the Rosetta breast cancer cohort.

[0015] FIG. 2C is a Kaplan Meier Curve of the Cox proportional analysis of the Mvt-1/Brd4 microarray gene expression signature on the lymph node-negative patients of the GSE2034 breast cancer cohort.

[0016] FIG. 2D is a Kaplan Meier Curve of the Cox proportional analysis of the Mvt-1/Brd4 microarray gene expression signature on the lymph node-negative patients of the GSE4922 breast cancer cohort.

[0017] FIG. 2E is a Kaplan Meier Curve of the Cox proportional analysis of the Mvt-1/Brd4 microarray gene expression signature on the estrogen receptor-positive patients of the GSE3494 breast cancer cohort.

[0018] FIG. 2F is a Kaplan Meier Curve of the Cox proportional analysis of the Mvt-1/Brd4 microarray gene expression signature on the estrogen receptor-positive patients of the Rosetta breast cancer cohort.

[0019] FIG. 2G is a Kaplan Meier Curve of the Cox proportional analysis of the Mvt-1/Brd4 microarray gene expression signature on the estrogen receptor-positive patients of the GSE2034 breast cancer cohort.

[0020] FIG. 2H is a Kaplan Meier Curve of the Cox proportional analysis of the Mvt-1/Brd4 microarray gene expression signature on the estrogen receptor-positive patients of the GSE4922 breast cancer cohort.

[0021] FIG. 3A is a Kaplan Meier Curve of the Cox proportional analysis of the Mvt-1/Anakin microarray gene expression signature on the GSE1456 breast cancer cohort in terms of overall survival.

[0022] FIG. 3B is a Kaplan Meier Curve of the Cox proportional analysis of the van't Veer 70-gene expression signature in terms of overall survival.

[0023] FIG. 3C is a Kaplan Meier Curve of the Cox proportional analysis of the Mvt-1/Anakin microarray gene expression signature on the lymph node-negative patients of the Dutch Rosetta breast cancer cohort.

[0024] FIG. 3D is a Kaplan Meier Curve of the Cox proportional analysis of the Mvt-1/Anakin microarray gene expression signature on the lymph node-positive patients of the Dutch Rosetta breast cancer cohort.

[0025] FIG. 3E is a Kaplan Meier Curve of the Cox proportional analysis of the Mvt-1/Anakin microarray gene expression signature on the estrogen receptor-positive patients of the Dutch Rosetta breast cancer cohort.

[0026] FIG. 3F is a Kaplan Meier Curve of the Cox proportional analysis of the van't Veer microarray gene expression signature on the estrogen receptor-negative patients of the Dutch Rosetta breast cancer cohort.

### DETAILED DESCRIPTION OF THE INVENTION

[0027] The invention provides arrays which can be used for detecting the expression levels of cancer-related target molecules. Each array comprises a substrate with which a set of addressable elements is associated in a predetermined manner. The array of the invention can, for example, be considered as a DNA chip, gene chip, or microarray.

[0028] As used herein, the term “addressable element” means an element that is attached to the substrate of the array at a predetermined position and specifically binds to a known target molecule, such that when target molecule-addressable element binding is detected, information regarding the identity of the bound target molecule is provided on the basis of the location of the element on the substrate. For the purposes of the invention, addressable elements are considered “different” if they do not bind to the same target molecule and/or the addressable elements are located at distinct positions within or on the substrate.

[0029] Generally, each of the addressable elements of the inventive arrays comprises a polynucleotide or polypeptide specific for (e.g., which specifically binds or hybridizes to) a target molecule. The polynucleotide or polypeptide may be referred to hereinafter as a “probe.” Generally, the probe is either a polynucleotide or polypeptide, depending on whether the target molecule for which the addressable element is specific is a polynucleotide or polypeptide. For example, if the target molecule is a nucleic acid target molecule (e.g., DNA, RNA, cDNA, etc.), and therefore is nucleotidic in nature, the addressable element can comprise a polynucleotide probe that specifically binds or hybridizes to the target molecule. Likewise, if the target molecule is a protein or polypeptide, the addressable element can comprise a polypeptide probe which specifically binds to the target molecule. However, the arrays of the invention are not so limited in this manner. The inventive arrays can, for example, comprise an addressable element comprising a polynucleotide which specifically binds to a polypeptide target molecule and/or comprise an addressable element comprising a polypeptide which binds to a polynucleotide target molecule.

[0030] Each of the addressable elements of the inventive arrays can independently comprise more than one copy of the polynucleotide or polypeptide probe. For instance, an addressable element can comprise multiple copies of a given polynucleotide or polypeptide probe having the same nucleotide or amino acid sequence. Additionally or alternatively, each of the addressable elements can independently comprise more than one different probe, provided that the probes selectively bind to the same target molecule. For example, an addressable element can comprise a first polynucleotide probe comprising a first sequence and a second polynucleotide probe comprising a second sequence which is different from the first sequence, wherein both the first and second probes bind to the same target molecule. Additionally or alternatively, an addressable element can comprise a polynucleotide probe and a polypeptide probe, each of which binds to the same target molecule.

[0031] In one embodiment of the invention, the array comprises a set of addressable elements, each of which comprises (i) a polynucleotide that specifically binds to a target molecule, (ii) a polypeptide that specifically binds to a target molecule, or (iii) a combination of (i) and (ii), wherein the target molecule is selected from the group consisting of the target molecules listed in Table 1.

TABLE 1

| | | | | Group(s) of |
|---|---|---|---|---|
| Target | Entrez | GenBank Accession No. | | which Target |
| Molecule Name | Gene ID No. | Nucleotide | Amino acid | Molecule is a Part |
| AARS | 16 | NM_001605.1 (SEQ ID NO: 7) | NP_001596.1 | 1, 2 |
| ALDH2 | 217 | NM_000690.2 (SEQ ID NO: 8) | NP_000681.2 (precursor) | 1 |
| ALDOC | 230 | NM_005165.2 (SEQ ID NO: 9) | NP_005156.1 | 1 |
| AQP1 | 358 | NM_198098.1 (SEQ ID NO: 10) | NP_932766.1 | 2 |
| ARHGEF6 | 9459 | NM_004840.2 (SEQ ID NO: 11) | NP_004831.1 | 1 |
| B4GALT6 | 9331 | NM_004775.2 (SEQ ID NO: 12) | NP_004766.1 | 1 |
| BYSL | 705 | NM_004053.3 (SEQ ID NO: 13) | NP_004044.3 | 2 |
| CELSR1 | 9620 | NM_014246.1 (SEQ ID NO: 14) | NP_055061.1 | 1 |
| CIRBP | 1153 | NM_001280.1 (SEQ ID NO: 15) | NP_001271.1 | 1, 2 |
| CLCN3 | 1182 | NM_173872.2 (SEQ ID NO: 16) | NP_776297.2 | 1 |
| | | NM_001829.2 | NP_001820.2 | |
| CRYAB | 1410 | NM_001885.1 (SEQ ID NO: 17) | NP_001876.1 | 1 |
| CTSO | 1519 | NM_001334.2 (SEQ ID NO: 18) | NP_001325.1 | 3 |
| DCTN6 | 10671 | NM_006571.2 (SEQ ID NO: 19) | NP_006562.1 | 3 |
| DDIT3 | 1649 | NM_004083.4 (SEQ ID NO: 20) | NP_004074.2 | 1 |
| DDX39 | 10212 | NM_005804.2 (SEQ ID NO: 21) | NP_005795.2 | 2, 4 |
| DKFZp564I0463 | — | AL117599 (SEQ ID NO: 22) | | 1 |
| FADS1 | 3992 | NM_013402.3 (SEQ ID NO: 23) | NP_037534.2 | 1 |
| FUT4 | 2526 | NM_002033.2 (SEQ ID NO: 24) | NP_002024.1 | 1 |
| FZD1 | 8321 | NM_003505.1 (SEQ ID NO: 25) | NP_003496.1 | 1, 3 |
| GLRB | 2743 | NM_000824.2 (SEQ ID NO: 26) | NP_000815.1 | 1 |
| GNG11 | 2791 | NM_004126.3 (SEQ ID NO: 27) | NP_004117.1 (precursor) | 1 |
| GNPAT | 8443 | NM_014236.1 (SEQ ID NO: 28) | NP_055051.1 | 1 |
| HBP1 | 26959 | NM_012257.3 (SEQ ID NO: 29) | NP_036389.2 | 1 |
| HOXB5 | 3215 | NM_002147.3 (SEQ ID NO: 30) | NP_002138.1 | 1 |
| IFRD1 | 3475 | NM_001007245.1 (SEQ ID NO: 31) | NP_001007246.1 | 1 |
| | | NM_001550.2 | NP_001541.2 | |
| IL13RA1 | 3597 | NM_001560.2 (SEQ ID NO: 32) | NP_001551.1 | 1 |
| JAK1 | 3716 | NM_002227.1 (SEQ ID NO: 33) | NP_002218.1 | 2 |
| LAMP2 | 3920 | NM_002294.1 | NP_002285.1 (precursor) | 1 |
| | | NM_013995.1 (SEQ ID NO: 34) | NP_054701.1 (precursor) | |
| LCP1 | 3936 | NM_002298.2 (SEQ ID NO: 35) | NP_002289.1 | 1 |
| LRRC16 | 55604 | NM_017640.3 (SEQ ID NO: 36) | NP_060110.3 | 3 |
| MCCC1 | 56922 | NM_020166.2 (SEQ ID NO: 37) | NP_064551.2 | 1 |
| MCCC2 | 64087 | NM_022132.3 (SEQ ID NO: 38) | NP_071415.1 | 1 |
| MPDZ | 8777 | NM_003829.1 (SEQ ID NO: 39) | NP_003820.1 | 2 |
| NUP93 | 9688 | NM_014669.2 (SEQ ID NO: 40) | NP_055484.2 | 2 |
| PDCD4 | 27250 | NM_145341.2 (SEQ ID NO: 41) | NP_663314.1 (isoform 2) | 1 |
| | | NM_014456.3 | NP_055271.2 (isoform 1) | |
| PDF | 64146 | NM_022341.1 (SEQ ID NO: 42) | NP_071736.1 | 2 |
| PER2 | 8864 | NM_022817.1 (SEQ ID NO: 43) | NP_073728.1 (isoform 1) | 1, 2 |
| | | NM_003894.3 | NP_003885.2 (isoform 2) | |
| PLAT | 5327 | NM_033011.1 | NP_127509.1 (isoform 3) | 1 |
| | | NM_000931.2 | NP_000922.2 (isoform 2) | |
| | | NM_000930.2 (SEQ ID NO: 44) | NP_000921.1 (isoform 1 | |
| | | | preprotein) | |
| PPAP2B | 8613 | NM_003713.3 (SEQ ID NO: 45) | NP_003704.3 | 2 |
| | | NM_177414.1 | NP_803133.1 | |
| RAB6B | 51560 | NM_016577.2 (SEQ ID NO: 46) | NP_057661.2 | 1 |
| SAP30 | 8819 | NM_003864.3 (SEQ ID NO: 47) | NP_003855.1 | 3, 4 |
| SLC16A3 | 9123 | NM_004207.1 (SEQ ID NO: 48) | NP_004198.1 | 1, 3, 4 |
| SLC19A1 | 6573 | NM_194255.1 | NP_919231.1 (isoform a) | 1 |
| | | NM_003056.2 (SEQ ID NO: 49) | NP_003047.2 (isoform b) | |
| SMARCA2 | 6595 | NM_003070.3 (SEQ ID NO: 50) | NP_003061.3 (isoform a) | 2 |
| | | NM_139045.2 | NP_620614.2 (isoform b) | |
| SNN | 8303 | NM_003498.4 (SEQ ID NO: 51) | NP_003489.1 | 1 |
| SORBS1 | 10580 | NM_015385.2 | NP_056200.1 (isoform 2) | 2 |
| | | NM_024991.1 | NP_079267.1 (isoform 6) | |
| | | NM_006434.2 | NP_006425.2 (isoform 1) | |
| | | NM_001034957.1 | NP_001030129.1 (isoform 7) | |
| | | NM_001034955.1 | NP_001030127.1 (isoform 4) | |
| | | NM_001034954.1 (SEQ ID NO: 52) | NP_001030126.1 (isoform 3) | |
| | | NM_001034956.1 | NP_001030128.1 (isoform 5) | |
| TFRC | 7037 | NM_003234.1 (SEQ ID NO: 53) | NP_003225.1 | 1 |
| TNS1 | 7145 | NM_022648.3 (SEQ ID NO: 54) | NP_072174.3 | 2, 3 |
| WDR26 | 80232 | NM_025160.4 (SEQ ID NO: 55) | NP_079436.3 | 2 |

[0032] The expression level of each of the target molecules of Table 1 significantly changes in cells when the cells overexpress the Anakin gene (also known in the art as Ribosomal RNA Processing 1 Homolog (RRP1B), which gene encodes the mRNA sequence of Accession No. NM_{—}015056 (SEQ ID NO: 1) and encodes the amino acid sequence of Accession No. NP_{—}0055871 (SEQ ID NO: 2), both sequences of which are available herein and from the GenBank database of the National Center for Biotechnology Information (NCBI) website. Ectopic expression of Anakin reduces tumor growth and metastasis burden in the highly metastatic Mvt-1 cell line. Therefore, the expression levels of the target molecules of Table 1 are characteristic of a tumor or a cancer in a subject, e.g., are predictive of whether a subject afflicted with cancer, e.g., breast cancer, will survive, as further described herein.

[0033] In a preferred embodiment of the invention, the array comprises a set of addressable elements, such that the set comprises an addressable element specific for each of the target molecules of Table 1. In this regard, all of the target molecules of Table 1 are detected by the array. Alternatively or additionally, the set of addressable elements can consist essentially of addressable elements specific for cancer-related target molecules, as described herein, such that cancer-related target molecules are predominantly detected by the array. For example, the set of addressable elements can consist essentially of the addressable elements that are specific for the target molecules of Table 1, in combination with one or more addressable elements not listed in Table 1, e.g., a cancer-related target molecule (e.g., any of the target molecules listed in Table 2). Alternatively, the set can consist essentially of the addressable elements specific for the target molecules of Table 1.

[0034] As shown in Table 1, the target molecules of Table 1 are subdivided into different groups. The target molecules of Group 1 are target molecules of Table 1 which exhibit the same expression patterns (e.g., are either upregulated or downregulated in the same manner) in patients of the van 't Veer breast cancer cohort (van't Veer et al., Nature 415: 484-485 (2002)). Therefore, the expression levels of the target molecules of Group 1 are characteristic of a tumor or a cancer in a subject, e.g., are predictive of whether a subject afflicted with cancer, e.g., breast cancer, will survive, as described herein, especially if the tumor or cancer of the subject is similar to the tumor or cancer of the patients of the van't Veer breast cancer cohort.

[0035] The target molecules of Group 2 are target molecules of Table 1 which exhibit the same expression patterns (e.g., are either upregulated or downregulated in the same manner) in patients of the GSE1456 breast cancer cohort (Pawitan et al., Breast Cancer Res. 7: R953-R964 (2005)). Therefore, the expression levels of the target molecules of Group 2 are characteristic of a tumor or a cancer in a subject, e.g., are predictive of whether a subject afflicted with cancer, e.g., breast cancer, will survive, as described herein, especially if the tumor or cancer of the subject is similar to the tumor or cancer of the patients of the GSE1456 breast cancer cohort.

[0036] The target molecules of Group 3 are target molecules of Table 1 which exhibit the same expression patterns (e.g., are either upregulated or downregulated in the same manner) in patients of the GSE3494 breast cancer cohort (Miller et al., Proc. Natl. Acad. Sci. U.S.A. 102: 13550-13555 (2005)). Therefore, the expression levels of the target molecules of Group 3are characteristic of a tumor or a cancer in a subject, e.g., are predictive of whether a subject afflicted with cancer, e.g., breast cancer, will survive, as described herein, especially if the tumor or cancer of the subject is similar to the tumor or cancer of the patients of the GSE3494 breast cancer cohort.

[0037] The target molecules of Group 4 are target molecules of Table 1 which exhibit the same expression patterns (e.g., are either upregulated or downregulated in the same manner) in patients of the GSE4922 breast cancer cohort (Ivshina et al., Cancer Res. 66: 10292-10301 (2006)). Therefore, the expression levels of the target molecules of Group 4 are characteristic of a tumor or a cancer in a subject, e.g., are predictive of whether a subject afflicted with cancer, e.g., breast cancer, will survive, as described herein, especially if the tumor or cancer of the subject is similar to the tumor or cancer of the patients of the GSE4922 breast cancer cohort.

[0038] In one embodiment of the invention, the array comprises a set of addressable elements specific for the target molecules listed in Group 1, Group 2, Group 3, Group 4, or any combination thereof (e.g., Groups 1-4, Groups 1-3, Groups 1 and 2, Groups 2-4, Groups 2 and 3, Groups 3 and 4).

[0039] In a preferred embodiment of the invention, the array comprises a set of addressable elements, such that the set comprises an addressable element specific for each of the target molecules of the Group(s). In this regard, all of the target molecules of the Group(s) are detected by the array. Alternatively or additionally, the set of addressable elements can consist essentially of addressable elements specific for cancer-related target molecules, as described herein, such that cancer-related target molecules are predominantly detected by the array. For example, the set of addressable elements can consist essentially of the addressable elements that are specific for the target molecules of the Group(s), in combination with one or more addressable elements not listed in the Group(s), e.g., a cancer-related target molecule (e.g., any of the target molecules listed in any of the other Group(s), Table 2, or a combination thereof). Alternatively, the set can consist essentially of the addressable elements specific for the target molecules of the Group(s).

[0040] The array of the invention can additionally or alternatively comprise a substrate and a set of addressable elements, wherein each addressable element comprises (i) a polynucleotide that specifically binds to a target molecule, (ii) a polypeptide that specifically binds to a target molecule, or (iii) a combination of (i) and (ii), wherein the target molecule is selected from the group consisting of the target molecules listed in Table 2.

TABLE 2

| Target | Entrez | | | Group(s) of |
|---|---|---|---|---|
| Molecule | Gene ID | GenBank Accession No. | | which Target |
| Name | No. | Nucleotide | Amino acid | Molecule is a Part |
| ANLN | 54443 | NM_018685 (SEQ ID NO: 56) | NP_061155 | 5 |
| ASF1B | 55723 | NM_018154.2 (SEQ ID NO: 57) | NP_060624.1 | 6, 8, 9 |
| ASPM | 259266 | NM_018136.2 (SEQ ID NO: 58) | NP_060606.2 | 6 to 9 |
| ATF3 | 467 | NM_001030287.1 | NP_001025458.1 (isoform 1) | 7 |
| | | NM_001674.2 | NP_001665.1 (isoform 1) | |
| | | NM_004024.3 (SEQ ID NO: 59) | NP_004015.3 (isoform 2) | |
| AURKA | 6790 | NM_003600.2 | NP_003591.2 | 6 to 9 |
| | | NM_198433.1 (SEQ ID NO: 60) | NP_940835.1 | |
| | | NM_198435.1 | NP_940837.1 | |
| | | NM_198434.1 | NP_940836.1 | |
| | | NM_198437.1 | NP_940839.1 | |
| | | NM_198436.1 | NP_940838.1 | |
| AURKB | 9212 | NM_004217.2 (SEQ ID NO: 61) | NP_004208.2 | 6, 8, 9 |
| BIRC5 | 332 | NM_001012271.1 (SEQ ID NO: 62) | NP_001012271.1 (isoform 3) | 5 to 9 |
| | | NM_001168.2 | NP_001159.2 (isoform 1) | |
| | | NM_001012270.1 | NP_001012270.1 (isoform 2) | |
| BLM | 641 | NM_000057.1 (SEQ ID NO: 63) | NP_000048.1 | 5, 8 |
| BRCA1 | 672 | NM_007297.2 | NP_009228.1 (isoform BRCA1-delta2-10) | 7 |
| | | NM_007298.2 | NP_009229.1 (isoform BRCA1-delta9-11) | |
| | | NM_007302.2 | NP_009233.1 (isoform BRCA1-delta9-10) | |
| | | NM_007305.2 | NP_009236.1 (isoform BRCA1-delta9-10-11b) | |
| | | NM_007303.2 | NP_009234.1 (isoform BRCA1-delta11) | |
| | | NM_007300.2 | NP_009231.1 (isoform BRCA1-delta14-18) | |
| | | NM_007299.2 | NP_009230.1 (isoform BRCA1-delta14-17) | |
| | | NM_007294.2 | NP_009225.1 (isoform 1) | |
| | | NM_007304.2 | NP_009235.2 (isoform BRCA1-delta11b) | |
| | | NM_007296.2 | NP_009227.1 (isoform 1) | |
| | | NM_007295.2 (SEQ ID NO: 64) | NP_009226.1 (isoform 1) | |
| BRRN1 | 679 | NM_015341.3 (SEQ ID NO: 65) | NP_056156.2 | 6 to 9 |
| BUB1 | 699 | NM_004336.2 (SEQ ID NO: 66) | NP_004327.1 | 5 to 9 |
| BUB1B | 701 | NM_001211.4 (SEQ ID NO: 67) | NP_001202.4 | 5, 6, 8, 9 |
| C1S | 716 | NM_201442.1 (SEQ ID NO: 68) | NP_958850.1 | 6, 8, 9 |
| | | NM_001734.2 | NP_001725.1 | |
| CAD | 790 | NM_004341.3 (SEQ ID NO: 69) | NP_004332.2 | 5 |
| CASP3 | 836 | NM_032991.2 | NP_116786.1 (preproprotein) | 8, 9 |
| | | NM_004346.3 (SEQ ID NO: 70) | NP_004337.2 (preproprotein) | |
| CBL | 867 | NM_005188.2 (SEQ ID NO: 71) | NP_005179.2 | 5 |
| CCNA2 | 890 | NM_001237.2 (SEQ ID NO: 72) | NP_001228.1 | 5 to 9 |
| CCNB1 | 891 | NM_031966.2 (SEQ ID NO: 73) | NP_114172.1 | 5, 6, 8, 9 |
| CCNB2 | 9133 | NM_004701.2 (SEQ ID NO: 74) | NP_004692.1 | 5 to 9 |
| CCNE2 | 9134 | NM_057749.1 (SEQ ID NO: 75) | NP_477097.1 (isoform 1) | 5 to 9 |
| | | NM_057735.1 | NP_477083.1 (isoform 2) | |
| CDC20 | 991 | NM_001255.1 (SEQ ID NO: 76) | NP_001246.1 | 5 to 9 |
| CDC25B | 994 | NM_021873.2 (SEQ ID NO: 77) | NP_068659.1 (isoform 1) | 5, 6, 8, 9 |
| | | NM_021872.2 | NP_068658.1 (isoform 3) | |
| | | NM_004358.3 | NP_004349.1 (isoform 2) | |
| CDC25C | 995 | NM_022809.1 | NP_073720.1 (isoform b) | 5 |
| | | NM_001790.2 (SEQ ID NO: 78) | NP_001781.1 (isoform a) | |
| CDC45L | 8318 | NM_003504.3 (SEQ ID NO: 79) | NP_003495.1 | 5, 6, 8, 9 |
| CDC6 | 990 | NM_001254.3 (SEQ ID NO: 80) | NP_001245.1 | 5, 6, 9 |
| CDC7 | 8317 | NM_003503.2 (SEQ ID NO: 81) | NP_003494.1 | 6 |
| CDCA3 | 83461 | NM_031299.3 (SEQ ID NO: 82) | NP_112589.1 | 6, 7 |
| CDCA8 | 55143 | NM_018101.2 (SEQ ID NO: 83) | NP_060571.1 | 6 to 9 |
| CDKN2D | 1032 | NM_079421.2 | NP_524145.1 | 5 |
| | | NM_001800.3 (SEQ ID NO: 84) | NP_001791.1 | |
| CDKN3 | 1033 | NM_005192.2 (SEQ ID NO: 85) | NP_005183.2 | 5, 6, 8, 9 |
| CENPA | 1058 | NM_001809.2 (SEQ ID NO: 86) | NP_001800.1 (isoform a) | 5 to 9 |
| CENPE | 1062 | NM_001813.2 (SEQ ID NO: 87) | NP_001804.2 | 5 to 9 |
| CENPF | 1063 | NM_016343.3 (SEQ ID NO: 88) | NP_057427.3 | 5, 6, 8, 9 |
| CHEK1 | 1111 | NM_001274.2 (SEQ ID NO: 89) | NP_001265.1 | 5, 6, 9 |
| FOXN3 | 1112 | NM_005197.2 (SEQ ID NO: 90) | NP_005188.2 | 6, 8, 9 |
| (CHES1) | | | | |
| CHKA | 1119 | NM_212469.1 | NP_997634.1 (isoform b) | 6 |
| | | NM_001277.2 (SEQ ID NO: 91) | NP_001268.2 (isoform a) | |
| CIRBP | 1153 | NM_001280.1 (SEQ ID NO: 92) | NP_001271.15, | 5, 6, 8, 9 |
| CKAP2 | 26586 | NM_018204.2 (SEQ ID NO: 93) | NP_060674.2 | 5, 8, 9 |
| CKS2 | 1164 | NM_001827.1 (SEQ ID NO: 94) | NP_001818.1 | 5, 6, 8, 9 |
| CP | 1356 | NM_000096.1 (SEQ ID NO: 95) | NP_000087.1 | 5 |
| DCTD | 1635 | NM_001012732.1 (SEQ ID NO: 96) | NP_001012750.1 (isoform a) | 8 |
| | | NM_001921.2 | NP_001912.2 (isoform b) | |
| DDIT4 | 54541 | NM_019058.2 (SEQ ID NO: 97) | NP_061931.1 | 8, 9 |
| DHODH | 1723 | NM_001361.3 (SEQ ID NO: 98) | NP_001352.2 | 5 |
| | | NM_001025193.1 | NP_001020364.1 | |
| DIXDC1 | 85458 | NM_001037954.1 (SEQ ID NO: 99) | NP_001033043.1 (isoform a) | 6, 8 |
| | | NM_033425.2 | NP_219493.1 (isoform b) | |
| DLEU2 | 8847 | NR_002612 (SEQ ID NO: 100) | | 5 |
| DLG7 | 9787 | NM_014750.3 (SEQ ID NO: 101) | NP_055565.2 | 6 to 9 |
| DNA2L | 1763 | XM_166103.7 (SEQ ID NO: 102) | XP_166103.4 | 5, 8, 9 |
| ESPL1 | 9700 | NM_012291.3 (SEQ ID NO: 103) | NP_036423.3 | 6, 8, 9 |
| ETV5 | 2119 | NM_004454.1 (SEQ ID NO: 104) | NP_004445.1 | 7 |
| EXO1 | 9156 | NM_130398.2 (SEQ ID NO: 105) | NP_569082.1 (isoform b) | 5, 6 |
| | | NM_006027.3 | NP_006018.3 (isoform b) | |
| | | NM_003686.3 | NP_003677.3 (isoform a) | |
| EYA2 | 2139 | NM_005244.3 | NP_005235.3 (isoform a) | 6 |
| | | NM_172110.1 | NP_742108.1 (isoform c) | |
| | | NM_172113.1 (SEQ ID NO: 106) | NP_742111.1 (isoform b) | |
| | | NM_172111.1 | NP_742109.1 (isoform a) | |
| | | NM_172112.1 | NP_742110.1 (isoform a) | |
| EZH2 | 2146 | NM_152998.1 | NP_694543.1 (isoform b) | 5, 6, 7, 9 |
| | | NM_004456.3 (SEQ ID NO: 107) | NP_004447.2 (isoform a) | |
| FAS | 355 | NM_000043.3 (SEQ ID NO: 108) | NP_000034.1 (isoform 1 precursor) | 6 to 9 |
| | | NM_152872.1 | NP_690611.1 (isoform 3 precursor) | |
| | | NM_152871.1 | NP_690610.1 (isoform 2 precursor) | |
| | | NM_152873.1 | NP_690612.1 (isoform 4 precursor) | |
| | | NM_152874.1 | NP_690613.1 (isoform 4 precursor) | |
| | | NM_152875.1 | NP_690614.1 (isoform 5 precursor) | |
| | | NM_152877.1 | NP_690616.1 (isoform 7 precursor) | |
| | | NM_152876.1 | NP_690615.1 (isoform 6 precursor) | |
| FBXO5 | 26271 | NM_012177.2 (SEQ ID NO: 109) | NP_036309.1 | 6, 8, 9 |
| FEN1 | 2237 | NM_004111.4 (SEQ ID NO: 110) | NP_004102.1 | 5, 6, 8, 9 |
| FIGNL1 | 63979 | NM_022116.2 (SEQ ID NO: 111) | NP_071399.2 | 5 |
| FOS | 2353 | NM_005252.2 (SEQ ID NO: 112) | NP_005243.1 | 5, 8, 9 |
| FXYD5 | 53827 | NM_144779.1 (SEQ ID NO: 113) | NP_659003.1 | 5 |
| | | NM_014164.4 | NP_054883.3 | |
| GADD45A | 1647 | NM_001924.2 (SEQ ID NO: 114) | NP_001915.1 | 8 |
| GATM | 2628 | NM_001482.1 (SEQ ID NO: 115) | NP_001473.1 | 6, 8, 9 |
| GHR | 2690 | NM_000163.2 (SEQ ID NO: 116) | NP_000154.1 (precursor) | 6, 8 |
| GNAQ | 2776 | NM_002072.2 (SEQ ID NO: 117) | NP_002063.2 | 6 |
| GPR126 | 57211 | NM_020455.4 (SEQ ID NO: 118) | NP_065188.4 (alpha 1) | 9 |
| | | NM_198569.1 | NP_940971.1 (beta 1) | |
| | | NM_001032394.1 | NP_001027566.1 (alpha 2) | |
| | | NM_001032395.1 | NP_001027567.1 (beta 2) | |
| H6PD | 9563 | NM_004285.3 (SEQ ID NO: 119) | NP_004276.2 | 5 |
| HIST1H1C | 3006 | NM_005319.3 (SEQ ID NO: 120) | NP_005310.1 | 6, 8, 9 |
| HMGA1 | 3159 | NM_145899.1 | NP_665906.1 (isoform a) | 6 to 9 |
| | | NM_002131.2 | NP_002122.1 (isoform b) | |
| | | NM_145903.1 | NP_665910.1 (isoform b) | |
| | | NM_145901.1 | NP_665908.1 (isoform a) | |
| | | NM_145902.1 | NP_665909.1 (isoform b) | |
| | | NM_145904.1 (SEQ ID NO: 121) | NP_665911.1 (isoform a) | |
| | | NM_145905.1 | NP_665912.1 (isoform b) | |
| HMGB2 | 3148 | NM_002129.2 (SEQ ID NO: 122) | NP_002120.1 | 8, 9 |
| HMMR | 3161 | NM_012484.1 (SEQ ID NO: 123) | NP_036616.1 (isoform a) | 5 to 9 |
| | | NM_012485.1 | NP_036617.1 (isoform b) | |
| HSPA4L | 22824 | NM_014278.2 (SEQ ID NO: 124) | NP_055093.2 | 6 |
| ITGB5 | 3693 | NM_002213.3 (SEQ ID NO: 125) | NP_002204.2 | 5, 6, 8 |
| KIF11 | 3832 | NM_004523.2 (SEQ ID NO: 126) | NP_004514.2 | 6, 8, 9 |
| KIF18A | 81930 | NM_031217.2 (SEQ ID NO: 127) | NP_112494.2 | 8, 9 |
| KIF20A | 10112 | NM_005733.1 (SEQ ID NO: 128) | NP_005724.1 | 6, 8, 9 |
| KIF22 | 3835 | NM_007317.1 (SEQ ID NO: 129) | NP_015556.1 | 6 |
| KIF23 | 9493 | NM_138555.1 (SEQ ID NO: 130) | NP_612565.1 (isoform 1) | 6 to 9 |
| | | NM_004856.4 | NP_004847.2 (isoform 2) | |
| KIF2C | 11004 | NM_006845.2 (SEQ ID NO: 131) | NP_006836.1 | 6, 8, 9 |
| NDC80 | 10403 | NM_006101.1 (SEQ ID NO: 132) | NP_006092.1 | 8, 9 |
| (KNTC2) | | | | |
| KPNA2 | 3838 | NM_002266.2 (SEQ ID NO: 298) | NP_002257.1 | 6, 8, 9 |
| LAMP2 | 3920 | NM_002294.1 (SEQ ID NO: 133) | NP_002285.1 (precursor) | 5, 6 |
| | | NM_013995.1 | NP_054701.1 (precursor) | |
| LAT2 | 7462 | NM_022040.3 (SEQ ID NO: 134) | NP_071323.1 | 8 |
| | | NM_032463.2 | NP_115852.1 | |
| | | NM_014146.3 | NP_054865.2 | |
| LIG1 | 3978 | NM_000234.1 (SEQ ID NO: 135) | NP_000225.1 | 6, 8, 9 |
| LIPG | 9388 | NM_006033.2 (SEQ ID NO: 136) | NP_006024.1 | 5 |
| LRP8 | 7804 | NM_033300.2 | NP_150643.2 | 5 |
| | | NM_017522.3 | NP_059992.3 | |
| | | NM_001018054.1 | NP_001018064.1 | |
| | | NM_004631.3 (SEQ ID NO: 137) | NP_004622.2 | |
| LSM4 | 25804 | NM_012321.2 (SEQ ID NO: 138) | NP_036453.1 | 5, 6, 8, 9 |
| NCAPG2 | 54892 | NM_017760.4 (SEQ ID NO: 139) | NP_060230.4 | 6, 8, 9 |
| (LUZP5) | | | | |
| MAD2L1 | 4085 | NM_002358.2 (SEQ ID NO: 140) | NP_002349.1 | 5 to 9 |
| MCM3 | 4172 | NM_002388.3 (SEQ ID NO: 141) | NP_002379.2 | 5, 6, 8, 9 |
| MCM4 | 4173 | NM_005914.2 (SEQ ID NO: 142) | NP_005905.2 | 6, 8, 9 |
| | | NM_182746.1 | NP_877423.1 | |
| MCM5 | 4174 | NM_006739.2 (SEQ ID NO: 143) | NP_006730.2 | 5, 6, 8, 9 |
| MCM6 | 4175 | NM_005915.4 (SEQ ID NO: 144) | NP_005906.2 | 5, 6, 8, 9 |
| MELK | 9833 | NM_014791.2 (SEQ ID NO: 145) | NP_055606.1 | 6 to 9 |
| MKI67 | 4288 | NM_002417.2 (SEQ ID NO: 146) | NP_002408.2 | 5 to 9 |
| MLF1IP | 79682 | NM_024629.2 (SEQ ID NO: 147) | NP_078905.2 | 6, 8, 9 |
| MRE11A | 4361 | NM_005590.3 (SEQ ID NO: 148) | NP_005581.2 (isoform 2) | 7 |
| | | NM_005591.3 | NP_005582.1 (isoform 1) | |
| MTM1 | 4534 | NM_000252.1 (SEQ ID NO: 149) | NP_000243.1 | 5, 7 |
| MXRA8 | 54587 | NM_032348.2 (SEQ ID NO: 150) | NP_115724.1 | 6, 8 |
| NEDD4L | 23327 | NM_015277.2 (SEQ ID NO: 151) | NP_056092.2 | 6 |
| NEK2 | 4751 | NM_002497.2 (SEQ ID NO: 152) | NP_002488.1 | 5 to 9 |
| NFIL3 | 4783 | NM_005384.2 (SEQ ID NO: 153) | NP_005375.2 | 5 |
| NME1 | 4830 | NM_198175.1 (SEQ ID NO: 154) | NP_937818.1 (isoform a) | 6, 9 |
| | | NM_000269.2 | NP_000260.1 (isoform b) | |
| NOV | 4856 | NM_002514.2 (SEQ ID NO: 155) | NP_002505.1 (precursor) | 8, 9 |
| NUP205 | 23165 | NM_015135.1 (SEQ ID NO: 156) | NP_055950.1 | 6 |
| NUP93 | 9688 | NM_014669.2 (SEQ ID NO: 157) | NP_055484.2 | 6, 8, 9 |
| NUSAP1 | 51203 | NM_016359.2 (SEQ ID NO: 158) | NP_057443.1 (isoform 1) | 6, 8, 9 |
| | | NM_018454.5 | NP_060924.4 (isoform 2) | |
| OGN | 4969 | NM_033014.1 (SEQ ID NO: 159) | NP_148935.1 (preproprotein) | 5, 6 |
| | | NM_024416.2 | NP_077727.1 (preproprotein) | |
| | | NM_014057.2 | NP_054776.1 (preproprotein) | |
| PBK | 55872 | NM_018492.2 (SEQ ID NO: 160) | NP_060962.2 | 6 to 9 |
| PBXIP1 | 57326 | NM_020524.2 (SEQ ID NO: 161) | NP_065385.2 | 6, 7 |
| PLEK2 | 26499 | NM_016445.1 (SEQ ID NO: 162) | NP_057529.1 | 5 |
| PLK1 | 5347 | NM_005030.3 (SEQ ID NO: 163) | NP_005021.2 | 6, 8, 9 |
| PLK4 | 10733 | NM_014264.2 (SEQ ID NO: 164) | NP_055079.2 | 7, 9 |
| POLD1 | 5424 | NM_002691.1 (SEQ ID NO: 165) | NP_002682.1 | 5 |
| POLE | 5426 | NM_006231.2 (SEQ ID NO: 166) | NP_006222.2 | 5 |
| POLE2 | 5427 | NM_002692.2 (SEQ ID NO: 167) | NP_002683.2 | 5, 6, 8, 9 |
| POSTN | 10631 | NM_006475.1 (SEQ ID NO: 168) | NP_006466.1 | 7, 8 |
| PRC1 | 9055 | NM_199413.1 (SEQ ID NO: 169) | NP_955445.1 (isoform 2) | 5 to 9 |
| | | NM_003981.2 | NP_003972.1 (isoform 1) | |
| | | NM_199414.1 | NP_955446.1 (isoform 3) | |
| PRIM1 | 5557 | NM_000946.2 (SEQ ID NO: 170) | NP_000937.1 | 5 |
| PRKG2 | 5593 | NM_006259.1 (SEQ ID NO: 171) | NP_006250.1 | 7 |
| PSAT1 | 29968 | NM_058179.2 (SEQ ID NO: 172) | NP_478059.1 (isoform 1) | 6, 7 |
| | | NM_021154.3 | NP_066977.1 (isoform 2) | |
| PTTG1 | 9232 | NM_004219.2 (SEQ ID NO: 173) | NP_004210.1 | 5, 6, 8, 9 |
| RACGAP1 | 29127 | NM_013277.2 (SEQ ID NO: 174) | NP_037409.2 | 6, 8, 9 |
| RAD51 | 5888 | NM_133487.1 | NP_597994.1 (isoform 2) | 5 to 9 |
| | | NM_002875.2 (SEQ ID NO: 175) | NP_002866.2 (isoform 1) | |
| RAD51AP1 | 10635 | NM_006479.2 (SEQ ID NO: 176) | NP_006470.1 | 6, 7 |
| RBL1 | 5933 | NM_002895.2 (SEQ ID NO: 177) | NP_002886.2 | 5 |
| | | NM_183404.1 | NP_899662.1 | |
| RCC1 | 1104 | NM_001269.2 (SEQ ID NO: 178) | NP_001260.1 | 6, 8, 9 |
| RFC4 | 5984 | NM_002916.3 (SEQ ID NO: 179) | NP_002907.1 | 5, 6, 8, 9 |
| | | NM_181573.1 | NP_853551.1 | |
| RPL22 | 6146 | NM_000983.3 (SEQ ID NO: 180) | NP_000974.1 (proprotein) | 5, 6 |
| RRM1 | 6240 | NM_001033.2 (SEQ ID NO: 181) | NP_001024.1 | 5, 6 |
| RRM2 | 6241 | NM_001034.1 (SEQ ID NO: 182) | NP_001025.1 | 5 to 9 |
| SEMA3C | 10512 | NM_006379.2 (SEQ ID NO: 183) | NP_006370.1 | 5, 8 |
| SHCBP1 | 79801 | NM_024745.2 (SEQ ID NO: 184) | NP_079021.2 | 6 to 9 |
| SKP2 | 6502 | NM_032637.2 | NP_116026.1 (isoform 2) | 8, 9 |
| | | NM_005983.2 (SEQ ID NO: 185) | NP_005974.2 (isoform 1) | |
| SMC2 | 10592 | NM_006444.1 (SEQ ID NO: 186) | NP_006435.1 | 5, 6, 8, 9 |
| (SMC2L1) | | | | |
| SMC4 | 10051 | NM_001002799.1 | NP_001002799.1 (isoform b) | 5, 6, 8, 9 |
| (SMC4L1) | | NM_001002800.1 | NP_001002800.1 (isoform a) | |
| | | NM_005496.3 (SEQ ID NO: 187) | NP_005487.3 (isoform a) | |
| SORL1 | 6653 | NM_003105.3 (SEQ ID NO: 188) | NP_003096.1 (preproprotein) | 5, 6, 8, 9 |
| SPAG5 | 10615 | NM_006461.3 (SEQ ID NO: 189) | NP_006452.3 | 6 to 9 |
| SPBC25 | 57405 | NM_020675.3 (SEQ ID NO: 190) | NP_065726.1 | 6, 8, 9 |
| STEAP1 | 26871 | NM_012449.2 (SEQ ID NO: 191) | NP_036581.1 | 8, 9 |
| STMN1 | 3925 | NM_203399.1 | NP_981944.1 | 5, 6, 8, 9 |
| | | NM_005563.3 | NP_005554.1 | |
| | | NM_203401.1 (SEQ ID NO: 192) | NP_981946.1 | |
| SYNPO | 11346 | NM_007286.3 (SEQ ID NO: 193) | NP_009217.3 | 6, 8, 9 |
| TACC3 | 10460 | NM_006342.1 (SEQ ID NO: 194) | NP_006333.1 | 5 to 9 |
| TGFBR1 | 7046 | NM_004612.2 (SEQ ID NO: 195) | NP_004603.1 (precursor) | 7 |
| TIMELESS | 8914 | NM_003920.2 (SEQ ID NO: 196) | NP_003911.1 | 5, 6, 8, 9 |
| TK1 | 7083 | NM_003258.1 (SEQ ID NO: 197) | NP_003249.1 | 5, 6, 8, 9 |
| TLE4 | 7091 | NM_007005.3 (SEQ ID NO: 198) | NP_008936.2 | 6, 8 |
| TOP2A | 7153 | NM_001067.2 (SEQ ID NO: 199) | NP_001058.2 | 5 to 9 |
| TOPBP1 | 11073 | NM_007027.2 (SEQ ID NO: 200) | NP_008958.1 | 5, 9 |
| TPX2 | 22974 | NM_012112.4 (SEQ ID NO: 201) | NP_036244.2 | 6, 8, 9 |
| TRIB3 | 57761 | NM_021158.3 (SEQ ID NO: 202) | NP_066981.2 | 6, 8, 9 |
| TRIP13 | 9319 | NM_004237.2 (SEQ ID NO: 203) | NP_004228.1 | 5, 6, 8, 9 |
| TROAP | 10024 | NM_005480.2 (SEQ ID NO: 204) | NP_005471.2 | 5, 8, 9 |
| TTK | 7272 | NM_003318.3 (SEQ ID NO: 205) | NP_003309.2 | 5 to 9 |
| TXNIP | 10628 | NM_006472.1 (SEQ ID NO: 206) | NP_006463.2 | 6 to 9 |
| UBE2C | 11065 | NM_181802.1 (SEQ ID NO: 207) | NP_861518.1 (isoform 4) | 6, 8, 9 |
| | | NM_181799.1 | NP_861515.1 (isoform 2) | |
| | | NM_007019.2 | NP_008950.1 (isoform 1) | |
| | | NM_181800.1 | NP_861516.1 (isoform 3) | |
| | | NM_181803.1 | NP_861519.1 (isoform 5) | |
| | | NM_181801.1 | NP_861517.1 (isoform 4) | |
| WDHD1 | 11169 | NM_001008396.1 | NP_001008397.1 (isoform 2) | 7 |
| | | NM_007086.2 (SEQ ID NO: 208) | NP_009017.1 (isoform 1) | |
| WHSC1 | 7468 | NM_133330.1 | NP_579877.1 (isoform 1) | 6, 8, 9 |
| | | NM_133331.1 | NP_579878.1 (isoform 1) | |
| | | NM_133335.1 | NP_579890.1 (isoform 1) | |
| | | NM_007331.1 | NP_015627.1 (isoform 4) | |
| | | NM_133334.1 (SEQ ID NO: 209) | NP_579889.1 (isoform 3) | |
| | | NM_133336.1 | NP_579891.1 (isoform 5) | |
| WIZ | 58525 | XM_372716.5 (SEQ ID NO: 210) | XP_372716.5 (isoform 1) | 7 |
| ZBTB10 | 65986 | NM_023929.2 (SEQ ID NO: 211) | NP_076418.2 | 7 |
| ZWILCH | 55055 | NM_017975.2 (SEQ ID NO: 212) | NP_060445.2 | 8, 9 |

[0041] The expression level of each of the target molecules of Table 2 significantly changes in cells when the cells overexpress the Brd4 gene, which gene encodes the mRNA sequence of Accession No. NM_{—}058243 (SEQ ID NO: 3) or NM_{—}014299 (SEQ ID NO: 4) and encodes the amino acid sequence of Accession No. NP_{—}490597.1 (SEQ ID NO: 5) or NP_{—}055114.1 (SEQ ID NO: 6), which sequences are available from the GenBank database of the NCBI website. Ectopic expression of the Brd4 gene in the highly metatstatic mouse mammay tumor cell line Mvt-1 reduces cell invasiveness as well as the ability of the cells to form extensions in a three-dimensional culture. Also, ectopic expression of Brd4 in Mvt-1 reduces tumor growth and pulmonary surface metastsis following subcutaneous implantation of cells into FVB/NJ mice. Therefore, the expression levels of the target molecules of Table 2 are characteristic of a tumor or a cancer in a subject, e.g., are predictive of whether a subject afflicted with cancer, e.g., breast cancer, will survive, as further described herein.

[0042] In a preferred embodiment of the invention, the array comprises a set of addressable elements, such that the set comprises an addressable element specific for each of the target molecules of Table 2. In this regard, all of the target molecules of Table 2 are detected by the array. Alternatively or additionally, the set of addressable elements can consist essentially of addressable elements specific for cancer-related target molecules, as described herein, such that cancer-related target molecules are predominantly detected by the array. For example, the set of addressable elements can consist essentially of the addressable elements that are specific for the target molecules of Table 2, in combination with one or more addressable elements not listed in Table 2, e.g., a cancer-related target molecule (e.g., any of the target molecules listed in any of Table 1). Alternatively, the set can consist essentially of the addressable elements specific for the target molecules of Table 2.

[0043] The target molecules of Group 5 are target molecules of Table 2 which exhibit the same expression patterns (e.g., are either upregulated or downregulated in the same manner) in patients of the GSE1456 breast cancer cohort (Pawitan et al., Breast Cancer Res. 7: R953-R964 (2005)). Therefore, the expression levels of the target molecules of Group 5 are characteristic of a tumor or a cancer in a subject, e.g., are predictive of whether a subject afflicted with cancer, e.g., breast cancer, will survive, as described herein, especially if the tumor or cancer of the subject is similar to the tumor or cancer of the patients of the GSE1456 breast cancer cohort.

[0044] The target molecules of Group 6 are target molecules of Table 2 which exhibit the same expression patterns (e.g., are either upregulated or downregulated in the same manner) in patients of the GSE2034 breast cancer cohort (Wang et al., Lancet 365: 671-679 (2005)). Therefore, the expression levels of the target molecules of Group 6 are characteristic of a tumor or a cancer in a subject, e.g., are predictive of whether a subject afflicted with cancer, e.g., breast cancer, will survive, as described herein, especially if the tumor or cancer of the subject is similar to the tumor or cancer of the patients of the GSE2034 breast cancer cohort.

[0045] The target molecules of Group 7 are target molecules of Table 2 which exhibit the same expression patterns (e.g., are either upregulated or downregulated in the same manner) in patients of the GSE3494 breast cancer cohort (Miller et al., Proc. Natl. Acad. Sci. U.S.A. 102: 13550-13555 (2005)). Therefore, the expression levels of the target molecules of Group 7 are characteristic of a tumor or a cancer in a subject, e.g., are predictive of whether a subject afflicted with cancer, e.g., breast cancer, will survive, as described herein, especially if the tumor or cancer of the subject is similar to the tumor or cancer of the patients of the GSE3494 breast cancer cohort.

[0046] The target molecules of Group 8 are target molecules of Table 2 which exhibit the same expression patterns (e.g., are either upregulated or downregulated in the same manner) in patients of the GSE4922 breast cancer cohort (Ivashina et al., Cancer Res. 66: 10292-10301 (2006)). Therefore, the expression levels of the target molecules of Group 8 are characteristic of a tumor or a cancer in a subject, e.g., are predictive of whether a subject afflicted with cancer, e.g., breast cancer, will survive, as described herein, especially if the tumor or cancer of the subject is similar to the tumor or cancer of the patients of the GSE4922 breast cancer cohort.

[0047] The target molecules of Group 9 are target molecules of Table 1 which exhibit the same expression patterns (e.g., are either upregulated or downregulated in the same manner) in patients of the Rosetta breast cancer cohort (van't Veer et al., Nature 415: 530-536 (2002)). Therefore, the expression levels of the target molecules of Group 9 are characteristic of a tumor or a cancer in a subject, e.g., are predictive of whether a subject afflicted with cancer, e.g., breast cancer, will survive, as described herein, especially if the tumor or cancer of the subject is similar to the tumor or cancer of the patients of the Rosetta breast cancer cohort.

[0048] In one embodiment of the invention, the array comprises a set of addressable elements specific for the target molecules listed in Group 5, Group 6, Group 7, Group 8, Group 9, or any combination thereof (e.g., Groups 5-9, Groups 5-8, Groups 5-7, Groups 5 and 6, Groups 6-9, Groups 6-8, Groups 6 and 7, Groups 7-9, Groups 7 and 8, and Groups 8 and 9.)

[0049] In a preferred embodiment of the invention, the array comprises a set of addressable elements, such that the set comprises an addressable element specific for each of the target molecules of the Group(s). In this regard, all of the target molecules of the Group(s) are detected by the array. Alternatively or additionally, the set of addressable elements can consist essentially of addressable elements specific for cancer-related target molecules, as described herein, such that cancer-related target molecules are predominantly detected by the array. For example, the set of addressable elements can consist essentially of the addressable elements that are specific for the target molecules of the Group(s), in combination with one or more addressable elements not listed in the Group(s), e.g., a cancer-related target molecule (e.g., any of the target molecules listed in any of the other Group(s), Table 1, or a combination thereof). Alternatively, the set can consist essentially of the addressable elements specific for the target molecules of the Group(s).

[0050] The addressable elements of the array may be specific for target molecules other than the ones listed in Tables 1 and 2. For example, the addressable elements of the array may be specific for other target molecules no listed in Table 1 or 2. By “cancer-related target molecule” as used herein is meant any molecule, e.g., DNA, RNA, protein, for which the expression level is significantly changed in a cancer cell as compared to a normal, non-cancerous cell. For example, the array can advantageously comprise an addressable element that binds to one of the cancer-related target molecules p53, Src, Ras, or a combination thereof.

[0051] In a preferred embodiment of the invention, when the array of the invention is specific for 5 or more of the target molecules listed in Table 3, the array is specific for at least one target molecule listed in Table 1 and/or 2 and that is not listed in Table 3.

TABLE 3

| | Entrez | | |
|---|---|---|---|
| | Gene | GenBank Accession No. | |
| Target Molecule | ID No. | Nucleotide | Amino acid |
| TSPYL5 (AL080059) | 85453 | NM_033512.2 (SEQ ID NO: 213) | NP_277047.2 |
| FLT1 | 2321 | NM_002019.2 (SEQ ID NO: 214) | NP_002010.1 |
| MMP9 | 4318 | NM_004994.2 (SEQ ID NO: 215) | NP_004985.2 |
| C16orf61 (DC13) | 56942 | NM_020188.2 (SEQ ID NO: 216) | NP_064573.1 |
| EXT1 | 2131 | NM_000127.2 (SEQ ID NO: 217) | NP_000118.2 |
| DIAPH3 (AL137718) | 81624 | NM_030932.2 (SEQ ID NO: 218) | NP_112194.2 |
| CDC42BPA (PK428) | 8476 | NM_014826.3 (SEQ ID NO: 219) | NP_055641.3 |
| | | NM_003607.2 (SEQ ID NO: 220) | NP_003598.2 |
| NDC80 (HEC) | 10403 | NM_006101.1 (SEQ ID NO: 221) | NP_006092.1 |
| ECT2 | 1894 | NM_018098.4 (SEQ ID NO: 222) | NP_060568.3 |
| GMPS | 8833 | NM_003875.2 (SEQ ID NO: 223) | NP_003866.1 |
| UCHL5 (UCH37) | 51377 | NM_015984.1 (SEQ ID NO: 224) | NP_057068.1 |
| EXOC7 (KIAA1067) | 23265 | NM_015219.2 (SEQ ID NO: 225) | NP_056034.2 |
| | | NM_001013839.1 (SEQ ID NO: 226) | NP_001013861.1 |
| GNAZ | 2781 | NM_002073.2 (SEQ ID NO: 227) | NP_002064.1 |
| SERF1A | 8293 | NM_021967.1 (SEQ ID NO: 228) | NP_068802.1 |
| OXCT1 | 5019 | NM_000436.2(SEQ ID NO: 229) | NP_000427.1 |
| ORC6L | 23594 | NM_014321.2 (SEQ ID NO: 230) | NP_055136.1 |
| DTL (L2DTL) | 51514 | NM_016448.1 (SEQ ID NO: 231) | NP_057532.1 |
| PRC1 | 9055 | NM_199413.1 (SEQ ID NO: 232) | NP_955445.1 |
| | | NM_003981.2 (SEQ ID NO: 233) | NP_003972.1 |
| | | NM_199414.1(SEQ ID NO: 234) | NP_955446.1 |
| AYTL2 (AF052162) | 79888 | NM_024830.3 (SEQ ID NO: 235) | NP_079106.3 |
| COL4A2 | 1284 | NM_001846.1 (SEQ ID NO: 236) | NP_001837.1 |
| MELK (KIAA0175) | 9833 | NM_014791.2 (SEQ ID NO: 237) | NP_055606.1 |
| RAB6B | 51560 | NM_016577.2 (SEQ ID NO: 238) | NP_057661.2 |
| DCK | 1633 | NM_000788.1 (SEQ ID NO: 239) | NP_000779.1 |
| CENPA | 1058 | NM_001809.2 (SEQ ID NO: 240) | NP_001800.1 |
| EGLN1 (SM20) | 54583 | NM_022051.1 (SEQ ID NO: 241) | NP_071334.1 |
| MCM6 | 4175 | NM_005915.4 (SEQ ID NO: 242) | NP_005906.2 |
| PALM2-AKAP2 | 445815 | NM_007203.3 (SEQ ID NO: 243) | NP_009134.1 |
| | | NM_147150.1(SEQ ID NO: 244) | NP_671492.1 |
| RFC4 | 5984 | NM_002916.3 (SEQ ID NO: 245) | NP_002907.1 |
| | | NM_181573.1 (SEQ ID NO: 246) | NP_853551.1 |
| SLC2A3 | 6515 | NM_006931.1 (SEQ ID NO: 247) | NP_008862.1 |
| MAP2K1IP1 (MP1) | 8649 | NM_021970.2 (SEQ ID NO: 248) | NP_068805.1 |
| C20orf46 (FLJ11190) | 55321 | NM_018354.1 (SEQ ID NO: 249) | NP_060824.1 |
| IGFBP5 | 3488 | NM_000599.2 (SEQ ID NO: 250) | NP_000590.1 |
| CCNE2 | 9134 | NM_057749.1 (SEQ ID NO: 251) | NP_477097.1 |
| | | NM_057735.1 (SEQ ID NO: 252) | NP_477083.1 |
| ESM1 | 11082 | NM_007036.3 (SEQ ID NO: 253) | NP_008967.1 |
| NMU | 10874 | NM_006681.1 (SEQ ID NO: 254) | |
| HRASLS (LOC57110) | 57110 | NM_020386.2 (SEQ ID NO: 255) | NP_065119.1 |
| PECI | 10455 | NM_006117.2 (SEQ ID NO: 256) | NP_006108.2 |
| | | NM_206836.1 (SEQ ID NO: 257) | NP_996667.1 |
| AP2B1 | 163 | NM_001030006.1 (SEQ ID NO: 258) | NP_001025177.1 |
| | | NM_001282.2 (SEQ ID NO: 259) | NP_001273.1 |
| MS4A7 (CFFM4) | 58475 | NM_021201.4 (SEQ ID NO: 260) | NP_067024.1 |
| | | NM_206938.1 (SEQ ID NO: 261) | NP_996821.1 |
| | | NM_206939.1 (SEQ ID NO: 262) | NP_996822.1 |
| | | NM_206940.1 (SEQ ID NO: 263) | NP_996823.1 |
| TGFB3 | 7043 | NM_003239.1 (SEQ ID NO: 264) | NP_003230.1 |
| STK32B (HSA250839) | 55351 | NM_018401.1 (SEQ ID NO: 265) | NP_060871.1 |
| GSTM3 | 2947 | NM_000849.3 (SEQ ID NO: 266) | NP_000840.2 |
| BBC3 | 27113 | NM_014417.2 (SEQ ID NO: 267) | NP_055232.1 |
| SCUBE2 (CEGP1) | 57758 | NM_020974.1 (SEQ ID NO: 268) | NP_066025.1 |
| WISP1 | 8840 | NM_003882.2 (SEQ ID NO: 269) | NP_003873.1 |
| | | NM_080838.1 (SEQ ID NO: 270) | NP_543028.1 |
| ALDH4A1 (ALDH4) | 8659 | NM_003748.2 (SEQ ID NO: 271) | NP_003739.2 |
| | | NM_170726.1 (SEQ ID NO: 272) | NP_733844.1 |
| EBF4 (KIAA1442) | 57593 | XM_044921.7 (SEQ ID NO: 273) | XP_044921.7 |
| FGF18 | 8817 | NM_003862.1 (SEQ ID NO: 274) | NP_003853.1 |
| Contig63649RC | | AW014921 (SEQ ID NO: 281) | |
| NUSAP1 (LOC51203) | 51203 | NM_016359.2 (SEQ ID NO: 275) | NP_057443.1 |
| | | NM_018454.5 (SEQ ID NO: 276) | NP_060924.4 |
| Contig46218RC | — | AI813331 (SEQ ID NO: 295) | |
| Contig38288RC | — | AI554061 (SEQ ID NO: 296) | |
| AA555029RC | — | SEQ ID NO: 1 of U.S. Pat. No. 7,171,311 | |
| Contig28552RC | — | AA992378 (SEQ ID NO: 283) | |
| Contig32185RC | — | AI377418 (SEQ ID NO: 297) | |
| Contig35251RC | — | AI283268 (SEQ ID NO: 287) | |
| Contig55725RC | — | AI992158 (SEQ ID NO: 288) | |
| Contig56457RC | — | AI741117 (SEQ ID NO: 289) | |
| GPR126 (DKFZP564D0462) | 57211 | NM_020455.4 (SEQ ID NO: 277) | NP_065188.4 |
| | | NM_198569.1 (SEQ ID NO: 278) | NP_940971.1 |
| | | NM_001032394.1 (SEQ ID NO: 279) | NP_001027566.1 |
| | | NM_001032395.1 (SEQ ID NO: 280) | NP_001027567.1 |
| Contig40831RC | — | AI224578 (SEQ ID NO: 290) | |
| Contig24252RC | — | AW024884 (SEQ ID NO: 282) | |
| Contig51464RC | — | AI817737 (SEQ ID NO: 291) | |
| Contig20217RC | — | AA834945 (SEQ ID NO: 284) | |
| Contig63102RC | — | AI583960 (SEQ ID NO: 292) | |
| Contig46223RC | — | AA528243 (SEQ ID NO: 285) | |
| Contig55377RC | — | AI918032 (SEQ ID NO: 293) | |
| Contig48328RC | — | AI694320 (SEQ ID NO: 294) | |
| Contig32125RC | — | AA404325 (SEQ ID NO: 286) | |

[0052] The array also can include one or more elements that serve as a control, standard, or reference molecule, such as a housekeeping gene (e.g., Porphobilinogen deaminase (PBGD), glyceraldehyde-3-phosphatase dehydrogenase (GAPDH), and RNA transferase) to assist in the normalization of expression levels or the determination of nucleic acid quality and binding characteristics, reagent quality and effectiveness, hybridization success, analysis thresholds and success, etc. These other common aspects of the arrays or the addressable elements, as well as methods for constructing and using arrays, including generating, labeling, and attaching suitable probes to the substrate, consistent with the invention are well-known in the art. Other aspects of the array are as previously described herein with respect to the methods of the invention.

[0053] It will be appreciated, however, that an array capable of detecting a vast number of target moleculess (e.g., mRNA or polypeptide targets), such as arrays designed for comprehensive expression profiling of a cell line (e.g., gene profiling) or the like, are not economical or convenient for use as a diagnostic tool or screen for any particular condition, e.g., cancer. Thus, to facilitate the convenient use of the array as a diagnostic tool or screen, for example, in conjunction with the methods described herein, the array preferably comprises a limited number of addressable elements and preferably comprises addressable elements specific only for cancer-related target molecules.

[0054] In this regard, the array desirably comprises less than 38,500 addressable elements. More desirably, the array comprises less than about 33,000 addressable elements or less than about 14,500 addressable elements. Further desirably, the array comprises less than about 8400 addressable elements, e.g., less than about 5000 addressable elements, less than 2500 addressable elements, e.g., 1000, 500, 100.

[0055] Also preferred is that the array comprises a number of addressable elements, such that the expression levels of multiple cancer-related target molecules are detected. In this regard, the array preferably detects the expression of at least 3 different target molecules, if not 10 or more target molecules, e.g., 50, 100, 250, 500, 1000 or more target molecules.

[0056] The addressable element can comprise a detectable label, such as, for instance, a radioisotope, a fluorophore (e.g., fluorescein isothiocyanate (FITC), phycoerythrin (PE)), an enzyme (e.g., alkaline phosphatase, horseradish peroxidase), and element particles (e.g., gold particles). The detectable label can be directly attached (either covalently or non-covalently) to the polynucleotide or polypeptide probe of the addressable element. Alternatively, the detectable label can be indirectly attached to the polynucleotide or polypeptide probe of the addressable element. For example, the detectable label can be attached via a linker.

[0057] With regard to the inventive arrays, the substrate can be any rigid or semi-rigid support to which polynucleotides or polypeptides can be covalently or non-covalently attached. Suitable substrates include membranes, filters, chips, slides, wafers, fibers, beads, gels, capillaries, plates, polymers, microparticles, and the like. Materials that are suitable for substrates include, for example, nylon, glass, ceramic, plastic, silica, aluminosilicates, borosilicates, metal oxides such as alumina and nickel oxide, various clays, nitrocellulose, and the like.

[0058] The polynucleotide or polypeptide probes of the addressable elements can be attached to the substrate in a pre-determined 1-, 2-, or 3-dimensional arrangement, such that the pattern of hybridization or binding to a probe is easily correlated with the expression of a particular target molecule. Because the probes are located at specified locations on or in the substrate, the hybridization or binding patterns and intensities thereof create a unique expression profile, which can be interpreted in terms of expression levels of particular target molecules and can be correlated with characteristics of the tumor or cancer, as further described herein.

[0059] Polynucleotide and polypeptide probes can be generated by any suitable method (see, e.g., Sambrook et al., Molecular Cloning: A Laboratory Manual, 2^{nd} Ed., Cold Spring Harbor Press, Cold Spring Harbor, N.Y., 1989). For example, polynucleotide probes that specifically bind to the mRNA transcripts of the target molecules described herein can be created using the target molecules themselves (or fragments thereof) by routine techniques (e.g., PCR or synthesis) based on the nucleotide sequence of the target molecule. As used herein, the term “fragment” means a contiguous part or portion of a polynucleotide sequence comprising about 10 or more nucleotides, preferably about 15 or more nucleotides, more preferably about 20 or more nucleotides (e.g., about 30 or more or even about 50 or more nucleotides).

[0060] Alternatively, the polynucleotide probe can be designed based on the sequence of the target molecule using probe design software, such as, for example, LightCycler® Probe Design Software 2.0 (Roche Applied Science, Indianapolis, Ind.).

[0061] The exact nature of the polynucleotide probe is not critical to the invention; any probe that will selectively bind the target molecule can be used. Typically, the polynucleotide probes will comprise 10 or more nucleotides (e.g., 20 or more, 50 or more, or 100 or more nucleotides). In order to confer sufficient specificity, it will have a sequence identity to a compliment of the target sequence (or corresponding fragment thereof) of about 90% or more, preferably about 95% or more (e.g., about 98% or more or about 99% or more) as determined, for example, using the well-known Basic Local Alignment Search Tool (BLAST) algorithm (available through the National Center for Biotechnology Information (NCBI) website).

[0062] Similarly, polypeptide probes that bind to the protein or polypeptide target molecules, or a fragment thereof, described herein can be created using the amino acid sequences of the target molecules using routine techniques. As used herein, the term fragment means a contiguous part or portion of any of a polypeptide sequence comprising about 5 or more amino acids, preferably about 10 or more amino acids, more preferably about 15 or more amino acids (e.g., about 20 or more amino acids or even about 30 or more or 50 or more amino acids). For example, antibodies to the protein or polypeptide target molecules can be generated in a mammal using routine techniques, which antibodies can be harvested to serve as probes for the target molecules. The exact nature of the probe is not critical to the invention; any probe that will selectively bind to the protein or polypeptide target molecule can be used. Preferred probes include antibodies and antibody fragments (e.g., F(ab)₂′ fragments, single chain antibody variable region fragment (ScFv) chains, and the like). Antibodies suitable for detecting the target molecules can be prepared by routine methods, and are commercially available. See, for instance, Harlow et al., Antibodies: A Laboratory Manual, Cold Spring Harbor Publishers, Cold Spring Harbor, N.Y., 1988.

[0063] The invention also provides a kit comprising a set of user instructions and (i) a set of polynucleotides, (ii) a set of polypeptides, or (iii) a combination thereof, wherein the set of polynucleotides is specific for the target molecules listed in any of Tables 1 and 2, Groups 1-13, or a combination thereof, wherein the set of polypeptides is specific for the target molecules listed in any of Tables 1 and 2, Groups 1-13, or a combination thereof

[0064] The polynucleotides and polypeptides of the kit which may be referred to hereinafter as “probes” are as previously described herein with respect to the polynucleotide probes and polypeptide probes of the array. Indeed, the polynucleotides and/or polypeptides of the kit can be provided in the form of an array. Alternatively, the probes of the kit can be provided unattached to any substrate, e.g., provided as a solution or a solid (e.g., a lyophilate) in one or more vials. The kit also can comprise probes specific for other cancer-related target molecules known in the art. However, to facilitate convenient use in a method of characterizing a tumor or a cancer in a subject, such as any of the methods described herein, the set of probes is preferably limited to a reasonable number. Thus, the kit preferably comprises less than about 38,500 probes, e.g., less than about 33,000 probes, less than about 14,500 probes, less than about 8400 probes, and less than about 5000 probes.

[0065] Also preferred is that the kit comprises a number of probes, such that the expression levels of multiple cancer-related target molecules are detected. In this regard, the kit preferably minimally detects the expression of at least 3 different target molecules, if not 10 or more target molecules, e.g., 50, 100, 250, 500, 1000 or more target molecules.

[0066] The polynucleotides and polypeptides of the kit can comprise a detectable label, such as, for instance, a radioisotope, a fluorophore (e.g., fluorescein isothiocyanate (FITC), phycoerythrin (PE)), an enzyme (e.g., alkaline phosphatase, horseradish peroxidase), and element particles (e.g., gold particles). In preferred embodiments of the invention, the detectable label is attached (either covalently or non-covalently) to the probes of the kit.

[0067] The kit also can comprise an appropriate buffer, suitable controls or standards as described elsewhere herein, and written or electronic instructions. Other aspects of the kit are as previously described with respect to the methods or the array of this invention.

[0068] The invention also provides methods of characterizing a tumor or cancer in a subject. The method comprises detecting the expression levels of a set of target molecules in the subject, wherein the set of target molecules comprises the target molecules listed in any of Tables 1 and 2 or Groups 1-13. Preferably, the set of target molecules consists essentially or consists of the target molecules of any of Tables 1 and 2, Groups 1-13, or a combination thereof

[0069] The inventive method of characterizing a tumor or cancer can include characterizing one, two, or any number of tumor or cancer characteristics. Preferably, the method characterizes the tumor or cancer in terms of one or more of metastatic capacity, tumor stage, tumor grade, nodal involvement, regional metastasis, distant metastasis, tumor size, and/or sex hormone receptor status.

[0070] The term “metastatic capacity” as used herein is synonymous with the term “metastatic potential” and refers to the chance that a tumor will become metastatic. The metastatic capacity of a tumor can range from high to low, e.g., from 100% to 0%. In this respect, the metastatic capacity of a tumor can be, for instance, 100%, 90%, 80%, 75%, 60%, 50%, 40%, 30%, 25%, 15%, 10%, 5%, 3%, 1%, or 0%. For example, a tumor having a metastatic capacity of 100% is a tumor having a 100% chance of becoming metastatic. Also, a tumor having a metastatic capacity of 50%, for example, is a tumor having a 50% chance of becoming metastatic. Further, a tumor with a metastatic capacity of 25%, for instance, is a tumor having a 25% chance of becoming metastatic.

[0071] “Tumor stage” as used herein refers to whether the cells of the tumor or cancer have remained localized (e.g., cells of the tumor or cancer have not metastasized from the primary tumor), have metastasized to only regional or surrounding tissues relative to the site of the primary tumor, or have metastasized to tissues that are distant from the site of the primary tumor.

[0072] “Tumor grade” as used herein refers to the degree of abnormality of cancer cells, a measure of differentiation, and/or the extent to which cancer cells are similar in appearance and function to healthy cells of the same tissue type. The degree of differentiation often relates to the clinical behavior of the particular tumor. Based on the microscopic appearance of cancer cells, pathologists commonly describe tumor grade by degrees of severity. Such terms are standard pathology terms, and are known and understood by one of ordinary skill in the art (see Crawford et al., Breast Cancer Research 8:R16; e-publication on Mar. 21, 2006)).

[0073] “Nodal involvement” as used herein refers to the presence of a tumor cell within a lymph node as detected by, for example, microscopic examination of a section of a lymph node.

[0074] “Regional metastasis” as used herein means the metastasis of a tumor cell to a region that is relatively close to the origin, i.e., the site of the primary tumor. For example, regional metastasis includes metastasis of a tumor cell to a regional lymph node that drains the primary tumor, i.e., that is connected to the primary tumor by way of the lymphatic system. Also, regional metastasis can be, for instance, the metastasis of a tumor cell to the liver in the case of a primary tumor that is in contact with the portal circulation. Further, regional metastasis can be, for example, metastasis to a mesenteric lymph node in the case of colon cancer. Furthermore, regional metastasis can be, for instance, metastasis to an axillary lymph node in the case of breast cancer.

[0075] The term “distant metastasis” as used herein refers to metastasis of a tumor cell to a region that is non-contiguous with the primary tumor (e.g., not connected to the primary tumor by way of the lymphatic or circulatory system). For instance, distant metastasis can be metastasis of a tumor cell to the brain in the case of breast cancer, a lung in the case of colon cancer, and an adrenal gland in the case of lung cancer.

[0076] “Sex hormone receptor status” as used herein means the status of whether a sex hormone receptor is expressed in the tumor cells or cancer cells. Sex hormone receptors are known in the art, including, for instance, the estrogen receptor, the testosterone receptor, and the progesterone receptor. Preferably, when characterizing certain cancers, such as breast cancer, the sex hormone receptor is the estrogen receptor or progesterone receptor.

[0077] As the metastatic capacity, tumor stage, tumor grade, nodal involvement, regional metastasis, distant metastasis, tumor size, and sex hormone receptor status are factors when considering whether a subject will survive from the cancer, the inventive method of characterizing a tumor or cancer in a subject desirably predicts whether the subject will survive from the cancer.

[0078] Further, as, for instance, the metastatic capacity, tumor stage, tumor grade, nodal involvement, regional metastasis, distant metastasis, tumor size, and sex hormone receptor status are factors considered when determining a treatment for a subject afflicted with a tumor or cancer, the inventive method of characterizing a tumor or cancer in a subject desirably determines a treatment for a subject afflicted with a tumor or a cancer.

[0079] The expression of target molecules can be detected or measured by any suitable method. For example, the expression of target molecules can be detected or measured on the basis of the expression levels of the mRNA or protein encoded by the target molecules. Suitable methods of detecting or measuring mRNA include, for example, Northern Blotting, reverse-transcription PCR (RT-PCR), and real-time RT-PCR. Such methods are described in Sambrook et al., Molecular Cloning: A Laboratory Manual, 2^{nd} Ed., Cold Spring Harbor Press, Cold Spring Harbor, N.Y., 1989. Of these methods, real-time RT-PCR is used. In real-time PCR, which is described in Bustin, J. Mol. Endocrinology 25: 169-193 (2000), PCRs are carried out in the presence of a labled (e.g., fluorogenic) oligonucleotide probe that hybridizes to the amplicons. The probes can be double-labeled, for example, with a reporter fluorochrome and a quencher fluorochrome. When the probe anneals to the complementary sequence of the amplicon during PCR, the Taq polymerase, which possesses 5′ nuclease activity, cleaves the probe such that the quencher fluorochrome is displaced from the reporter fluorochrome, thereby allowing the latter to emit fluorescence. The resulting increase in emission, which is directly proportional to the level of amplicons, is monitored by a spectrophotometer. The cycle of amplification at which a particular level of fluorescence is detected by the spectrophotometer is called the threshold cycle, C_{T}. It is this value that is used to compare levels of amplicons. Probes suitable for detecting mRNA levels of the target molecules described herein are commercially available and/or can be prepared by routine methods, such as methods discussed elsewhere herein.

[0080] Suitable methods of detecting protein levels in a sample include Western Blotting, radio-immunoassay, and Enzyme-Linked Immunosorbent Assay (ELISA). Such methods are described in Nakamura et al., Handbook of Experimental Immunology, 4^{th} ed., Vol. 1, Chapter 27, Blackwell Scientific Publ., Oxford, 1987. When detecting proteins in a sample using an immunoassay, the sample is typically contacted with antibodies or antibody fragments (e.g., F(ab)₂′ fragments, single chain antibody variable region fragment (ScFv) chains, and the like) that specifically bind the protein or polypeptide target molecule. Antibodies and other polypeptides suitable for detecting the target molecules in conjunction with immunoassays are commercially available and/or can be prepared by routine methods, such as methods discussed elsewhere herein (e.g., Harlow et al., Antibodies: A Laboratory Manual, Cold Spring Harbor Publishers, Cold Spring Harbor, N.Y., 1988).

[0081] The immune complexes formed upon incubating the sample with the antibody are subsequently detected by any suitable method. In general, the detection of immune complexes is well-known in the art and can be achieved through the application of numerous approaches. These methods are generally based upon the detection of a label or marker, such as any radioactive, fluorescent, biological or enzymatic tags or labels of standard use in the art. U.S. Patents concerning the use of such labels include U.S. Pat. Nos. 3,817,837, 3,850,752, 3,939,350, 3,996,345, 4,277,437, 4,275,149 and 4,366,241.

[0082] For example, the antibody used to form the immune complexes can, itself, be linked to a detectable label, thereby allowing the presence of or the amount of the primary immune complexes to be determined. Alternatively, the first added component that becomes bound within the primary immune complexes can be detected by means of a second binding ligand that has binding affinity for the first antibody. In these cases, the second binding ligand is, itself, often an antibody, which can be termed a “secondary” antibody. The primary immune complexes are contacted with the labeled, secondary binding ligand, or antibody, under conditions effective and for a period of time sufficient to allow the formation of secondary immune complexes. The secondary immune complexes are then washed to remove any non-specifically bound labeled secondary antibodies or ligands, and the remaining label in the secondary immune complexes is then detected.

[0083] Other methods include the detection of primary immune complexes by a two-step approach. A second binding ligand, such as an antibody, that has binding affinity for the first antibody can be used to form secondary immune complexes, as described above. After washing, the secondary immune complexes can be contacted with a third binding ligand or antibody that has binding affinity for the second antibody, again under conditions effective and for a period of time sufficient to allow the formation of immune complexes (tertiary immune complexes). The third ligand or antibody is linked to a detectable label, allowing detection of the tertiary immune complexes thus formed. A number of other assays are contemplated; however, the invention is not limited as to which method is used.

[0084] In a preferred embodiment of the inventive method, the expression levels are detected with one of the arrays or kits of the invention.

[0085] The inventive methods of characterizing a tumor or a cancer in a subject can be performed in vitro or in vivo. Preferably, the method is carried out in vitro.

[0086] Also, the invention provides use of a compound with anti-cancer activity for the preparation of a medicament to treat or prevent cancer in a subject for whom the expression levels of a set of target molecules have been determined, wherein the set of target molecules comprises the target molecules listed in any of Tables 1 and 2, Groups 1-13, or a combination thereof. Preferably, the set of target molecules consists essentially or consists of the target molecules of any of Tables 1 and 2, Groups 1-13, or a combination thereof. In a preferred embodiment of the inventive method, the expression levels are detected with any of the arrays or kits of the invention.

[0087] The anti-cancer activity can be any anti-cancer activity, including, but not limited to the reduction or inhibition of any of uncontrolled cell growth, loss of cell adhesion, altered cell morphology, foci formation, colony formation, in vivo tumor growth, and metastasis. Suitable methods for assaying for anti-cancer activity are known in the art (see, for example, Gong et al., Proc Natl Acad Sci USA, 101(44):15724-15729 (2004)—Epub 2004 Oct. 21).

[0088] The compound having anti-cancer activity can be any compound, including, but not limited to a small molecular weight compound, peptide, peptidomimetic, macromolecule, natural product, synthetic compound, and semi-synthetic compound. The compound can be a compound known to have anti-cancer activity, such as, for instance, asparaginase, busulfan, carboplatin, cisplatin, daunorubicin, doxorubicin, fluorouracil, gemcitabine, hydroxyurea, methotrexate, paclitaxel, rituximab, vinblastine, vincristine, etc.

[0089] For purposes herein, the cancer can be any cancer. As used herein, the term “cancer” is meant any malignant growth or tumor caused by abnormal and uncontrolled cell division that may spread to other parts of the body through the lymphatic system or the blood stream. The cancer can be any cancer, including any of acute lymphocytic cancer, acute myeloid leukemia, alveolar rhabdomyosarcoma, bone cancer, brain cancer, breast cancer, cancer of the anus, anal canal, or anorectum, cancer of the eye, cancer of the intrahepatic bile duct, cancer of the joints, cancer of the neck, gallbladder, or pleura, cancer of the nose, nasal cavity, or middle ear, cancer of the oral cavity, cancer of the vulva, chronic lymphocytic leukemia, chronic myeloid cancer, colon cancer, esophageal cancer, cervical cancer, gastrointestinal carcinoid tumor. Hodgkin lymphoma, hypopharynx cancer, kidney cancer, larynx cancer, liver cancer, lung cancer, malignant mesothelioma, melanoma, multiple myeloma, nasopharynx cancer, non-Hodgkin lymphoma, ovarian cancer, pancreatic cancer, peritoneum, omentum, and mesentery cancer, pharynx cancer, prostate cancer, rectal cancer, renal cancer (e.g., renal cell carcinoma (RCC)), small intestine cancer, soft tissue cancer, stomach cancer, testicular cancer, thyroid cancer, ureter cancer, and urinary bladder cancer.

[0090] The cancer can be an epithelial cancer. As used herein the term “epithelial cancer” refers to an invasive malignant tumor derived from epithelial tissue that can metastasize to other areas of the body, e.g., a carcinoma. Preferably, the epithelial cancer is breast cancer. Alternatively, the cancer can be a non-epithelial cancer, e.g., a sarcoma, leukemia, myeloma, lymphoma, neuroblastoma, glioma, or a cancer of muscle tissue or of the central nervous system (CNS).

[0091] The cancer can be a non-epithelial cancer. As used herein, the term “non-epithelial cancer” refers to an invasive malignant tumor derived from non-epithelial tissue that can metastasize to other areas of the body.

[0092] The cancer can be a metastatic cancer or a non-metastatic (e.g., localized) cancer. As used herein, the term “metastatic cancer” refers to a cancer in which cells of the cancer have metastasized, e.g., the cancer is characterized by metastasis of a cancer cells. The metastasis can be regional metastasis or distant metastasis, as described herein. Preferably, the cancer is a metastatic cancer.

[0093] As used herein, the term “subject” is meant any living organism. Preferably, the subject is a mammal. The term “mammal” as used herein refers to any mammal, including, but not limited to, mammals of the order Rodentia, such as mice and hamsters, and mammals of the order Logomorpha, such as rabbits. It is preferred that the mammals are from the order Carnivora, including Felines (cats) and Canines (dogs). It is further preferred that the mammals are from the order Artiodactyla, including Bovines (cows) and Swines (pigs) or of the order Perssodactyla, including Equines (horses). It is further preferred that the mammals are of the order Primates, Ceboids, or Simoids (monkeys) or of the order Anthropoids (humans and apes). An especially preferred mammal is the human.

[0094] With respect to the inventive methods and uses, the set of target molecules for which the expression levels are detected can be from a sample obtained from the subject. The sample can be any suitable sample. The sample can be a liquid or fluid sample, such as a sample of body fluid (e.g., blood, plasma, interstitial fluid, bile, lymph, milk, semen, saliva, urine, mucous, etc.), or a solid sample, such as a hair or tissue sample (e.g., liver tissue or tumor tissue sample), which can be processed prior to use. A sample also may include a cell or cell line created under experimental conditions, which is not directly isolated from a subject or host, or a product produced in cell culture by normal, non-tumor, or transformed cells (e.g., via recombinant DNA technology).

[0095] As used herein, the term “detect” with respect to the expression of target molecules means to determine the presence or absence of detectable expression of a target molecule. Thus, detection encompasses, but is not limited to, measuring or quantifying the expression level of a target molecule by any method. Preferably, the method involves detecting or measuring the expression of the target molecule in such a way as to facilitate the comparison of expression levels between samples.

### Examples

[0096] The following examples further illustrate the invention but, of course, should not be construed as in any way limiting its scope.

### Example 1

[0097] This example demonstrates the microarray analysis of mouse Mvt-1 cell lines ectopically expressing Brd4.

[0098] Affymetrix microarrays are used to compare gene expression in four Mvt-1 clonal isolates ectopically expressing Brd4 (Mvt-1/Brd4) and three Mvt-1 clonal isolates ectopically expressing β-galactosidase (Mvt-1/β-galactosidase). Total RNA from the clonal isolates is extracted using TRIzol Reagent (Life Technologies, Inc.) according to the standard protocol. Total RNA samples are subjected to DNase I treatment, and sample quantity and quality determined as described above. Purified total RNA for each clonal isolate are then pooled to produce a uniform sample containing 8 μg.

[0099] Double stranded cDNA is synthesized from this preparation using the SuperScript Choice System for cDNA Synthesis (Invitrogen, Carlsbad, Calif.) according to the protocol for Affymetrix GeneChip Eukaryotic Target Preparation. The double stranded cDNA is purified using the GeneChip Sample Cleanup Module (Qiagen, Valencia, Calif.). Synthesis of biotin-labeled cRNA is obtained by in vitro transcription of the purified template cDNA using the Enzo BioArray High Yield RNA Transcript Labeling Kit (T7) (Enzo Life Sciences, Inc., Farmingdale, N.Y.). cRNAs are purified using the GeneChip Sample Cleanup Module (Qiagen). Hybridization cocktails from each fragmentation reaction are prepared according to the Affymetrix GeneChip protocol. The hybridization cocktail is applied to the Affymetrix GeneChip Mouse Genome 430 2.0 arrays, processed on the Affymetrix Fluidics Station 400, and analyzed on an Agilent GeneArray Scanner with Affymetrix Microarray Suite version 5.0.0.032 software. Normalization is performed using the BRB-Array Tools software (Yang et al., Clin. Exp. Metastasis 21: 719-735 (2004) and Yang et al., Clin. Exp. Metastasis 22: 593-603 (2005)).

[0100] CEL files are analyzed using the Affymetrix GeneChip Probe Level Data RMA option of BRB ArrayTools 3.5.0. Genes with <1.5 fold-change from the gene's median value in 50% of samples, or a log-ratio variation P>0.01 are eliminated from analyses. To identify a Brd4 expression signature, the Class Comparison tool of BRB ArrayTools is performed, using a two-sample t-test with random variance univariate test. P-values for significance are computed based on 10,000 random permutations, at a nominal significance level of each univariate test of 0.0001. A total of 2,577 probe sets pass these criteria.

[0101] Examples of probe sets significantly up regulated and down regulated according to these criteria are listed in Tables 4 and 5, respectively.

TABLE 4

| | Fold difference of | | | |
|---|---|---|---|---|
| | geom means | | | |
| | (Transfected/Control | | | |
| | cell lines) | Probe set | Gene symbol | Description |
| 1 | 125.0 | 1419663_at | Ogn | osteoglycin |
| 2 | 90.9 | 1423100_at | Fos | FBJ osteosarcoma oncogene |
| 3 | 62.5 | 1423606_at | Postn | periostin, osteoblast specific |
| | | | | factor |
| 4 | 58.8 | 1448735_at | Cp | ceruloplasmin |
| 5 | 58.8 | 1419662_at | Ogn | osteoglycin |
| 6 | 52.6 | 1416239_at | Ass1 | argininosuccinate synthetase 1 |
| 7 | 41.7 | 1424214_at | 9130213B05Rik | RIKEN cDNA 9130213B05 |
| | | | | gene |
| 8 | 37.0 | 1417494_a_at | Cp | ceruloplasmin |
| 9 | 35.7 | 1428891_at | 9130213B05Rik | RIKEN cDNA 9130213B05 |
| | | | | gene |
| 10 | 33.3 | 1455393_at | Cp | ceruloplasmin |
| 11 | 28.6 | 1423859_a_at | Ptgds | prostaglandin D2 synthase |
| | | | | (brain) |
| 12 | 27.8 | 1434465_x_at | Vldlr | very low density lipoprotein |
| | | | | receptor |
| 13 | 27.0 | 1460251_at | Fas | Fas (TNF receptor superfamily |
| | | | | member) |
| 14 | 26.3 | 1424041_s_at | C1s | complement component 1, s |
| | | | | subcomponent |
| 15 | 25.6 | 1417900_a_at | Vldlr | very low density lipoprotein |
| | | | | receptor |

TABLE 5

| | Fold difference of geom means | | | |
|---|---|---|---|---|
| | (Transfected/Control | Affymetrix | | |
| | cell lines) | Probe set | Gene symbol | Description |
| 1 | 0.385 | 1452717_at | Slc25a24 | solute carrier family 25 (mitochondrial |
| | | | | carrier, phosphate carrier), member 24 |
| 2 | 0.375 | 1429158_at | Fbxo28 | F-box protein 28 |
| 3 | 0.364 | 1416068_at | Kars | lysyl-tRNA synthetase |
| 4 | 0.356 | 1418905_at | Nubp1 | nucleotide binding protein 1 |
| 5 | 0.353 | 1420592_a_at | Anp32e | acidic (leucine-rich) nuclear phosphoprotein |
| | | | | 32 family, member E |
| 6 | 0.351 | 1431686_a_at | Gmfb | glia maturation factor, beta |
| 7 | 0.350 | 1425472_a_at | Lmna | lamin A |
| 8 | 0.348 | 1447934_at | 9630033F20Rik | RIKEN cDNA 9630033F20 gene |
| 9 | 0.347 | 1416014_at | Abce1 | ATP-binding cassette, sub-family E (OABP), |
| | | | | member 1 |
| 10 | 0.337 | 1417773_at | Nans | N-acetylneuraminic acid synthase (sialic acid |
| | | | | synthase) |
| 11 | 0.331 | 1435379_at | AK122209 | cDNA sequence AK122209 |
| 12 | 0.325 | 1454702_at | 4930503L19Rik | RIKEN cDNA 4930503L19 gene |
| 13 | 0.319 | 1450569_a_at | Rbm14 | RNA binding motif protein 14 |
| 14 | 0.319 | 1456566_x_at | Rbm14 | RNA binding motif protein 14 |
| 15 | 0.317 | 1416308_at | Ugdh | UDP-glucose dehydrogenase |

[0102] Gene ontological (GO) analysis is performed using BRB ArrayTools, and reveal that 149 classes of genes are modulated in response to ectopic expression of Brd4 at the nominal 0.005 level of the LS permutation test or KS permutation test. Examples of the 149 classes of genes are shown in Table 6.

TABLE 6

| | | | | | LS | KS |
|---|---|---|---|---|---|---|
| | GO | | | Number of | Permutation | Permutation |
| | category | GO Term | GO description | genes | P-value | P-value |
| 1 | 785 | Cellular Component | chromatin | 44 | 1.00E−05 | 0.00018 |
| 2 | 5694 | Cellular Component | chromosome | 96 | 1.00E−05 | 1.00E−05 |
| 3 | 5739 | Cellular Component | mitochondrion | 78 | 1.00E−05 | 1.00E−05 |
| 4 | 5783 | Cellular Component | endoplasmic reticulum | 49 | 1.00E−05 | 0.00062 |
| 5 | 5886 | Cellular Component | plasma membrane | 98 | 1.00E−05 | 0.00019 |
| 6 | 9986 | Cellular Component | cell surface | 15 | 1.00E−05 | 6.00E−04 |
| 7 | 15630 | Cellular Component | microtubule cytoskeleton | 58 | 1.00E−05 | 0.00162 |
| 8 | 5102 | Molecular Function | receptor binding | 50 | 1.00E−05 | 1.00E−05 |
| 9 | 5125 | Molecular Function | cytokine activity | 19 | 1.00E−05 | 1.00E−05 |
| 10 | 5215 | Molecular Function | transporter activity | 99 | 1.00E−05 | 1.00E−05 |
| 11 | 15267 | Molecular Function | channel or pore class transporter activity | 24 | 1.00E−05 | 0.00086 |
| 12 | 15288 | Molecular Function | porin activity | 14 | 1.00E−05 | 0.00123 |
| 13 | 30234 | Molecular Function | enzyme regulator activity | 80 | 1.00E−05 | 0.00078 |
| 14 | 6091 | Biological Process | generation of precursor metabolites and | 64 | 1.00E−05 | 1.00E−04 |
| | | | energy | | | |
| 15 | 6325 | Biological Process | establishment and/or maintenance of | 22 | 1.00E−05 | 0.00177 |
| | | | chromatin architecture | | | |
| 16 | 6412 | Biological Process | protein biosynthesis | 49 | 1.00E−05 | 1.00E−05 |
| 17 | 6468 | Biological Process | protein amino acid phosphorylation | 61 | 1.00E−05 | 5.00E−04 |
| 18 | 6512 | Biological Process | ubiquitin cycle | 69 | 1.00E−05 | 0.00412 |
| 19 | 6793 | Biological Process | phosphorus metabolism | 82 | 1.00E−05 | 0.00045 |

[0103] Examination of the complete list of gene classes reveals that ectopic expression of Brd4 in Mvt-1 cells modulates expression of genes involved in processes such as cellular proliferation, cell cycle progression and chromatin structure. Furthermore, it is apparent that, at least in this cell line, Brd4 also regulates a number of processes that are critical to metastasis (e.g. cytoskeletal remodeling, cell adhesion, extracellular matrix expression).

[0104] This example identified genes of which the expression levels change in response to ectopic expression of Brd4.

### Example 2

[0105] This example demonstrates that the Mvt-1/Brd4 signature predicts outcome in multiple breast cancer expression datasets.

[0106] A high confidence human transcriptional signature of BRD4 gene expression signature is generated by mapping the most significantly differentially regulated genes (P<10⁻⁷) from mouse array data to human Affymetrix and the Rosetta probe set annotations. Specifically, 638 probe sets, whose differential expression demonstrated P<10⁻⁷, are selected. A gene list representing the probes is developed and used to map to the probe sets of the human U133 Affymetrix GeneChip using the Batch Search function of NetAffx located on the Affymetrix website. A human signature of 971 probe sets representing more than 350 genes is identified and is shown in Table 7.

TABLE 7

| Probe Set ID | Gene Symbol | Gene Title |
|---|---|---|
| 201872_s_at; 201873_s_at | ABCE1 | ATP-binding cassette, sub-family E (OABP), member 1 |
| 201963_at; 207275_s_at; | ACSL1 | acyl-CoA synthetase long-chain family member 1 |
| 1552619_a_at; 222608_s_at | ANLN | anillin, actin binding protein (scraps homolog, Drosophila) |
| 208103_s_at; 221505_at | ANP32E | acidic (leucine-rich) nuclear phosphoprotein 32 family, |
| | | member E /// acidic (leucine-rich) nuclear phosphoprotein 32 family, |
| | | member E |
| 204492_at | ARHGAP11A | Rho GTPase activating protein 11A |
| 212738_at; 37577_at | ARHGAP19 | Rho GTPase activating protein 19 |
| 218115_at | ASF1B | ASF1 anti-silencing function 1 homolog B (S. cerevisiae) |
| 219918_s_at; 232238_at; 239002_at | ASPM | asp (abnormal spindle)-like, microcephaly associated (Drosophila) |
| 218782_s_at; 222740_at; 228401_at; | ATAD2 | ATPase family, AAA domain containing 2 |
| 235266_at | | |
| 1554420_at; 1554980_a_at; 202672_s_at | ATF3 | activating transcription factor 3 |
| 204092_s_at; 208079_s_at; 208080_at | AURKA | aurora kinase A |
| 209464_at; 239219_at; | AURKB | aurora kinase B |
| 214390_s_at; 214452_at; 225285_at; | BCAT1 | branched chain aminotransferase 1, cytosolic |
| 226517_at | | |
| 201169_s_at; 201170_s_at | BHLHB2 | basic helix-loop-helix domain containing, class B, 2 |
| 1555826_at; 202094_at; 202095_s_at; | BIRC5 | Baculoviral IAP repeat-containing 5 (□emaphori) |
| 210334_x_at | | |
| 205733_at | BLM | Bloom syndrome |
| 209590_at; 209591_s_at; 211259_s_at; | BMP7 | Bone morphogenetic protein 7 (osteogenic protein 1) |
| 211260_at | | |
| 204531_s_at; 211851_x_at; | BRCA1 | breast cancer 1, early onset |
| 212949_at | BRRN1 | barren homolog 1 (Drosophila) |
| 209642_at; 215508_at; 215509_s_at; | BUB1 | BUB1 budding uninhibited by benzimidazoles 1 homolog (yeast) |
| 216275_at; 216277_at; 233445_at | | |
| 203755_at | BUB1B | BUB1 budding uninhibited by benzimidazoles 1 homolog beta (yeast) |
| 209182_s_at; 209183_s_at; | C10orf10 | chromosome 10 open reading frame 10 |
| 225372_at; 225373_at | C10orf54 | chromosome 10 open reading frame 54 |
| 219099_at | C12orf5 | chromosome 12 open reading frame 5 |
| 219166_at | C14orf104 | chromosome 14 open reading frame 104 |
| 1557755_at; 1557756_a_at; 232635_at; | C14orf145 | chromosome 14 open reading frame 145 |
| 233859_at; 244033_at | | |
| 223474_at | C14orf4 | chromosome 14 open reading frame 4 |
| 1553644_at | C14orf49 | chromosome 14 open reading frame 49 |
| 218447_at | C16orf61 | chromosome 16 open reading frame 61 |
| 217640_x_at | C18orf24 | chromosome 18 open reading frame 24 |
| 226242_at; 240803_at | C1orf131 | chromosome 1 open reading frame 131 |
| 220011_at; 222946_s_at | C1orf135 | chromosome 1 open reading frame 135 |
| 1553697_at; 1553698_a_at; 1555145_at; | C1orf96 | chromosome 1 open reading frame 96 |
| 225904_at | | |
| 1555229_a_at; 208747_s_at; 233042_at; | C1S | complement component 1, s subcomponent |
| 224690_at; 224693_at | C20orf108 | chromosome 20 open reading frame 108 |
| 225890_at; 242453_at | C20orf72 | chromosome 20 open reading frame 72 |
| 219004_s_at; 228597_at; 229671_s_at | C21orf45 | chromosome 21 open reading frame 45 |
| 226464_at; 228079_at; 235853_at; | C3orf58 | chromosome 3 open reading frame 58 |
| 241050_at; | | |
| 218518_at; 241169_at | C5orf5 | chromosome 5 open reading frame 5 |
| 229953_x_at; 242006_at; 244401_at | C6orf152 | chromosome 6 open reading frame 152 |
| 227534_at | C9orf21 | chromosome 9 open reading frame 21 |
| 1564084_at; 202715_at | CAD | Carbamoyl-phosphate synthetase 2, aspartate transcarbamylase, and |
| | | dihydroorotase |
| 1552421_a_at | CALR3 | calreticulin 3 |
| 202763_at; 236729_at | CASP3 | caspase 3, apoptosis-related cysteine peptidase |
| 206607_at; 225231_at; 225234_at; | CBL | Cas-Br-M (murine) ecotropic retroviral transforming sequence |
| 229010_at; 243475_at | | |
| 203418_at; 213226_at | CCNA2 | cyclin A2 |
| 214710_s_at; 228729_at | CCNB1 | cyclin B1 |
| 1560161_at; 202705_at; 232764_at; | CCNB2 | Cyclin B2 |
| 232768_at | | |
| 205034_at; 211814_s_at; | CCNE2 | cyclin E2 |
| 1559936_at; 204826_at; 204827_s_at; | CCNF | Cyclin F |
| 241551_at | | |
| 214151_s_at; 214152_at; 221156_x_at; | CCPG1 | cell cycle progression 1 |
| 221511_x_at; 222156_x_at | | |
| 202870_s_at | CDC20 | CDC20 cell division cycle 20 homolog (S. cerevisiae) |
| 201853_s_at | CDC25B | cell division cycle 25B |
| 1570624_at; 205167_s_at; 216914_at; | CDC25C | Cell division cycle 25C |
| 217010_s_at | | |
| 204126_s_at | CDC45L | CDC45 cell division cycle 45-like (S. cerevisiae) |
| 203967_at; 203968_s_at | CDC6 | CDC6 cell division cycle 6 homolog (S. cerevisiae) |
| 204510_at | CDC7 | CDC7 cell division cycle 7 (S. cerevisiae) |
| 223381_at | CDCA1 | cell division cycle associated 1 |
| 1560968_at; 226661_at; 236957_at | CDCA2 | Cell division cycle associated 2 |
| 221436_s_at; 223307_at | CDCA3 | cell division cycle associated 3 /// cell division cycle associated 3 |
| 224753_at | CDCA5 | cell division cycle associated 5 |
| 224428_s_at; 230060_at | CDCA7 | cell division cycle associated 7 /// cell division cycle associated 7 |
| 221520_s_at | CDCA8 | cell division cycle associated 8 |
| 210240_s_at; 213586_at | CDKN2D | cyclin-dependent kinase inhibitor 2D (p19, inhibits CDK4) |
| 1555758_a_at; 209714_s_at | CDKN3 | cyclin-dependent kinase inhibitor 3 (CDK2-associated dual specificity |
| | | phosphatase) |
| 207230_at; 227526_at | CDON | Cdon homolog (mouse) |
| 204962_s_at; 210821_x_at | CENPA | centromere protein A, 17 kDa |
| 205046_at | CENPE | centromere protein E, 312 kDa |
| 207331_at; 207828_s_at; 209172_s_at | CENPF | centromere protein F, 350/400ka (mitosin) |
| 231772_x_at | CENPH | centromere protein H |
| 218827_s_at; 243315_at; 243490_at | CEP192 | centrosomal protein 192 kDa |
| 205393_s_at; 205394_at; 238075_at | CHEK1 | CHK1 checkpoint homolog (S. pombe) |
| 210416_s_at | CHEK2 | CHK2 checkpoint homolog (S. pombe) |
| 1562673_at; 205021_s_at; 205022_s_at; | CHES1 | Checkpoint suppressor 1 |
| 218031_s_at; 222494_at; 229237_s_at; | | |
| 241984_at; 243842_at; 244208_at | | |
| 204233_s_at | CHKA | choline kinase alpha |
| 204266_s_at | CHKA /// LOC650122 | choline kinase alpha /// similar to choline kinase alpha isoform a |
| 1556985_at; 221065_s_at | CHST8 | Carbohydrate (N-acetylgalactosamine 4-0) sulfotransferase 8 |
| 200810_s_at; 200811_at; 225191_at; | CIRBP | cold inducible RNA binding protein |
| 228519_x_at; 230142_s_at | | |
| 1554264_at; 218252_at | CKAP2 | cytoskeleton associated protein 2 |
| 204170_s_at | CKS2 | CDC28 protein kinase regulatory subunit 2 |
| 1553120_at; 219621_at | CLSPN | claspin homolog (Xenopus laevis) |
| 1561144_at; 201774_s_at | CNAP1 | Chromosome condensation-related SMC-associated protein 1 |
| 1558034_s_at; 204846_at; 214282_at; | CP | ceruloplasmin (ferroxidase) |
| 227253_at; | | |
| 1557295_a_at; 202551_s_at; | CRIM1 | Cysteine rich transmembrane BMP regulator 1 (chordin-like) |
| 202552_s_at; 228496_s_at; 233073_at; | | |
| 242803_at | | |
| 205927_s_at | CTSE | cathepsin E |
| 203302_at; 224115_at | DCK | deoxycytidine kinase |
| 201571_s_at; 201572_x_at; 210137_s_at | DCTD | dCMP deaminase |
| 209383_at | DDIT3 | DNA-damage-inducible transcript 3 |
| 202887_s_at | DDIT4 | DNA-damage-inducible transcript 4 |
| 208151_x_at; 208718_at; 208719_s_at; | DDX17 | DEAD (Asp-Glu-Ala-Asp) box polypeptide 17 /// DEAD (Asp-Glu-Ala- |
| 213998_s_at; 230180_at | | Asp) box polypeptide 17 |
| 1558473_at; 226980_at; 233115_at | DEPDC1B | DEP domain containing 1B |
| 202532_s_at; 202534_x_at; 48808_at | DHFR /// LOC643509 | dihydrofolate reductase /// similar to Dihydrofolate reductase |
| 202533_s_at | DHFR /// LOC643509 /// | dihydrofolate reductase /// similar to Dihydrofolate reductase /// similar to |
| | LOC653874 | Dihydrofolate reductase |
| 213632_at | DHODH | dihydroorotate dehydrogenase |
| 202802_at; 207831_x_at; 211558_s_at | DHPS | deoxyhypusine synthase |
| 1558340_at; 1558342_x_at; 214724_at | DIXDC1 | DIX domain containing 1 |
| 204687_at; 225809_at | DKFZP564O0823 | DKFZP564O0823 protein |
| 218726_at | DKFZp762E1312 | hypothetical protein DKFZp762E1312 |
| 1556820_a_at; 1556821_x_at; | DLEU2 | deleted in lymphocytic leukemia, 2 |
| 1563229_at; 1569600_at; 216870_x_at; | | |
| 239936_at; 242854_x_at | | |
| 215629_s_at | DLEU2 /// DLEU2L | deleted in lymphocytic leukemia, 2 /// deleted in lymphocytic leukemia 2- |
| | | like |
| 1564443_at | DLEU2 /// RFP2OS | deleted in lymphocytic leukemia, 2 /// ret finger protein 2 opposite strand |
| 203764_at | DLG7 | discs, large homolog 7 (Drosophila) |
| 213647_at | DNA2L | DNA2 DNA replication helicase 2-like (yeast) |
| 213088_s_at; 213092_x_at | DNAJC9 | DnaJ (Hsp40) homolog, subfamily C, member 9 |
| 201697_s_at; 227684_at | DNMT1 | DNA (cytosine-5-)-methyltransferase 1 |
| 224814_at; 238012_at; 241973_x_at | DPP7 | dipeptidyl-peptidase 7 |
| 218585_s_at; 222680_s_at | DTL | denticleless homolog (Drosophila) |
| 201041_s_at; 201044_x_at; 226578_s_at | DUSP1 | dual specificity phosphatase 1 |
| 219990_at | E2F8 | E2F transcription factor 8 |
| 219787_s_at; 234992_x_at; 237241_at | ECT2 | epithelial cell transforming sequence 2 oncogene |
| 209392_at; 210839_s_at | ENPP2 | ectonucleotide pyrophosphatase/phosphodiesterase 2 (autotaxin) |
| 202609_at; 238371_s_at; 238372_s_at | EPS8 | epidermal growth factor receptor pathway substrate 8 |
| 1564473_at; 235178_x_at; 235588_at; | ESCO2 | Establishment of cohesion 1 homolog 2 (S. cerevisiae) |
| 241252_at | | |
| 204817_at; 38158_at | ESPL1 | extra spindle poles like 1 (S. cerevisiae) |
| 1554576_a_at; 211603_s_at; | ETV4 | ets variant gene 4 (E1A enhancer binding protein, E1AF) |
| 203348_s_at; 203349_s_at; 216375_s_at; | ETV5 | ets variant gene 5 (ets-related molecule) |
| 230102_at | | |
| 204774_at | EVI2A | ecotropic viral integration site 2A |
| 204603_at | EXO1 | exonuclease 1 |
| 209692_at; 243652_at | EYA2 | eyes absent homolog 2 (Drosophila) |
| 203358_s_at; 215006_at | EZH2 | enhancer of zeste homolog 2 (Drosophila) |
| 218248_at; 229196_at; 239368_at | FAM111A | family with sequence similarity 111, member A |
| 218602_s_at; 222685_at; 233655_s_at | FAM29A | family with sequence similarity 29, member A |
| 225684_at; 225686_at | FAM33A | family with sequence similarity 33, member A |
| 228069_at; 234944_s_at; 234945_at | FAM54A | family with sequence similarity 54, member A |
| 221591_s_at | FAM64A | family with sequence similarity 64, member A |
| 224871_at | FAM79A | family with sequence similarity 79, member A |
| 225687_at | FAM83D | family with sequence similarity 83, member D |
| 1568889_at; 1568891_x_at; 223545_at; | FANCD2 | Fanconi anemia, complementation group D2 |
| 242560_at | | |
| 204780_s_at; 204781_s_at; 215719_x_at; | FAS | Fas (TNF receptor superfamily, member 6) |
| 216252_x_at; 233820_at; 237522_at | | |
| 1554795_a_at; 1555480_a_at; | FBLIM1 | filamin binding LIM protein 1 |
| 1555483_x_at; 225258_at | | |
| 1555971_s_at; 1555972_s_at; 202271_at; | FBXO28 | F-box protein 28 |
| 202272_s_at | | |
| 218875_s_at; 234863_x_at | FBXO5 | F-box protein 5 |
| 204767_s_at; 204768_s_at | FEN1 | flap structure-specific endonuclease 1 |
| 1552921_a_at; 222843_at | FIGNL1 | fidgetin-like 1 |
| 222267_at; 235158_at | FLJ14803 | hypothetical protein FLJ14803 |
| 219544_at; 234745_at; 234757_at; | FLJ22624 | FLJ22624 protein |
| 236560_at | | |
| 228281_at | FLJ25416 | hypothetical protein FLJ25416 |
| 209189_at | FOS | v-fos FBJ murine osteosarcoma viral oncogene homolog |
| 202768_at | FOSB | FBJ murine osteosarcoma viral oncogene homolog B |
| 205409_at; 218880_at; 218881_s_at; | FOSL2 | FOS-like antigen 2 |
| 225262_at; 241824_at | | |
| 1553613_s_at | FOXC1 | forkhead box C1 |
| 202580_x_at | FOXM1 | forkhead box M1 |
| 1558996_at; 1560353_at; 1561166_a_at; | FOXP1 | forkhead box P1 |
| 1563157_at; 1570134_at; 215221_at; | | |
| 223287_s_at; 223936_s_at; 223937_at; | | |
| 224837_at; 224838_at; 230415_at; | | |
| 232096_x_at; 235444_at; 238712_at; | | |
| 240666_at; 241993_x_at; 243291_at; | | |
| 243878_at; 244535_at; 244845_at | | |
| 1555046_at; 1563223_a_at; 207590_s_at | FSHPRH1 | FSH primary response (LRPR1 homolog, rat) 1 |
| 217655_at; 218084_x_at; 224252_s_at | FXYD5 | FXYD domain containing ion transport regulator 5 |
| 210220_at | FZD2 | frizzled homolog 2 (Drosophila) |
| 203725_at | GADD45A | growth arrest and DNA-damage-inducible, alpha |
| 218313_s_at; 222587_s_at | GALNT7 | UDP-N-acetyl-alpha-D-galactosamine:polypeptide N- |
| | | acetylgalactosaminyltransferase 7 (GalNAc-T7) |
| 203178_at; 216733_s_at;; 231590_at; | GATM | glycine amidinotransferase (L-arginine:glycine amidinotransferase) |
| 231686_at; 235426_at; | | |
| 205164_at; 36475_at | GCAT | glycine C-acetyltransferase (2-amino-3-ketobutyrate coenzyme A ligase) |
| 220291_at | GDPD2 | glycerophosphodiester phosphodiesterase domain containing 2 |
| 219722_s_at | GDPD3 | glycerophosphodiester phosphodiesterase domain containing 3 |
| 205498_at; 241584_at | GHR | growth hormone receptor |
| 202543_s_at; 202544_at | GMFB | glia maturation factor, beta |
| 218350_s_at | GMNN | geminin, DNA replication inhibitor |
| 202615_at; 211426_x_at; 224861_at; | GNAQ | Guanine nucleotide binding protein (G protein), q polypeptide |
| 224862_at; 224863_at; 236238_at | | |
| 223487_x_at; 223488_s_at | GNB4 | guanine nucleotide binding protein (G protein), beta polypeptide 4 |
| 1553025_at; 213094_at; 233887_at | GPR126 | G protein-coupled receptor 126 |
| 205770_at; 225609_at; 237402_at | GSR | glutathione reductase |
| 202680_at | GTF2E2 | general transcription factor IIE, polypeptide 2, beta 34 kDa |
| 1555685_at; 206933_s_at; 221892_at; | H6PD | Hexose-6-phosphate dehydrogenase (glucose 1-dehydrogenase) |
| 226160_at | | |
| 220224_at | HAO1 | hydroxyacid oxidase (glycolate oxidase) 1 |
| 220085_at; 223556_at; 227350_at; | HELLS | helicase, lymphoid-specific |
| 234040_at; 242890_at | | |
| 1569380_a_at; 217168_s_at | HERPUD1 | Homocysteine-inducible, endoplasmic reticulum stress-inducible, ubiquitin- |
| | | like domain member 1 |
| 201944_at | HEXB | hexosaminidase B (beta polypeptide) |
| 213763_at; 219028_at; 224016_at; | HIPK2 | Homeodomain interacting protein kinase 2 |
| 224065_at; 224066_s_at; 225097_at; | | |
| 225115_at; 225116_at; 225368_at; | | |
| 240294_at | | |
| 209398_at | HIST1H1C | histone 1, H1c |
| 214455_at; 236193_at | HIST1H2BC | histone 1, H2bc |
| 221582_at; 231681_x_at | HIST3H2A | histone 3, H2a |
| 206074_s_at; 210457_x_at | HMGA1 | high mobility group AT-hook 1 |
| 208808_s_at; 236091_at; 243368_at | HMGB2 | high-mobility group box 2 |
| 1557029_at; 1562677_at; 207165_at; | HMMR | Hyaluronan-mediated motility receptor (RHAMM) |
| 209709_s_at | | |
| 206997_s_at; 214165_s_at; 225263_at | HS6ST1 | heparin sulfate 6-O-sulfotransferase 1 |
| 205543_at | HSPA4L | heat shock 70 kDa protein 4-like |
| 208937_s_at | ID1 | inhibitor of DNA binding 1, dominant negative helix-loop-helix protein |
| 204615_x_at; 208881_x_at; 233014_at; | IDI1 | isopentenyl-diphosphate delta isomerase 1 |
| 242065_x_at | | |
| 209929_s_at; 36004_at | IKBKG | inhibitor of kappa light polypeptide gene enhancer in B-cells, kinase gamma |
| 207072_at | IL18RAP | interleukin 18 receptor accessory protein |
| 206569_at | IL24 | interleukin 24 |
| 1566043_at; 1566044_at; 219769_at; | INCENP | Inner centromere protein antigens 135/155 kDa |
| 244862_at | | |
| 213447_at | IPW | imprinted in Prader-Willi syndrome |
| 229638_at | IRX3 | Iroquois related homeobox protein 3 |
| 201124_at; 201125_s_at; 214020_x_at; | ITGB5 | integrin, beta 5 |
| 214021_x_at | | |
| 205718_at; 227331_at; 236810_at | ITGB7 | integrin, beta 7 |
| 200079_s_at; 200840_at | KARS | lysyl-tRNA synthetase /// lysyl-tRNA synthetase |
| 210261_at | KCNK2 | potassium channel, subfamily K, member 2 |
| 1563608_a_at; 1569461_at; 1569462_x_at | KCNT1 | potassium channel, subfamily T, member 1 |
| 202503_s_at; 211713_x_at242486_at | KIAA0101 | KIAA0101 |
| 223254_s_at; 223255_at; 223256_at; | KIAA1333 | KIAA1333 |
| 223257_at; 223258_s_at | | |
| 1559060_a_at; 223997_at; 228250_at; | KIAA1961 | KIAA1961 gene |
| 228768_at; 243861_at | | |
| 204444_at | KIF11 | kinesin family member 11 |
| 221258_s_at | KIF18A | kinesin family member 18A /// kinesin family member 18A |
| 218755_at | KIF20A | kinesin family member 20A |
| 202183_s_at; 216969_s_at | KIF22 | kinesin family member 22 |
| 204709_s_at; 244427_at | KIF23 | kinesin family member 23 |
| 209408_at; 211519_s_at; 209680_s_at | KIF2C | kinesin family member 2C |
| 220266_s_at; 221841_s_at | KLF4 | Kruppel-like factor 4 (gut) |
| 206551_x_at; 221985_at; 221986_s_at; | KLHL24 | kelch-like 24 (Drosophila) |
| 226158_at; 242088_at | | |
| 206316_s_at | KNTC1 | kinetochore associated 1 |
| 204162_at | KNTC2 | kinetochore associated 2 |
| 201088_at; 211762_s_at | KPNA2 /// LOC643995 | karyopherin alpha 2 (RAG cohort 1, importin alpha 1) /// similar to Importin |
| | | alpha-2 subunit (Karyopherin alpha-2 subunit) (SRP1-alpha) (RAG cohort |
| | | protein 1) |
| 200821_at; 203041_s_at; 203042_at | LAMP2 | lysosomal-associated membrane protein 2 |
| 211768_at; 221581_s_at | LAT2 | linker for activation of T cells family, member 2 /// linker for activation of T |
| | | cells family, member 2 |
| 207409_at | LECT2 | leukocyte cell-derived chemotaxin 2 |
| 202726_at | LIG1 | ligase I, DNA, ATP-dependent |
| 219181_at | LIPG | lipase, endothelial |
| 1554600_s_at; 203411_s_at; | LMNA | lamin A/C |
| 212086_x_at; 212089_at; 214213_x_at; | | |
| 244225_x_at | | |
| 222039_at; 241569_at | LOC146909 | hypothetical protein LOC146909 |
| 235088_at; 238015_at | LOC201725 | hypothetical protein LOC201725 |
| 222336_at; 224990_at | LOC201895 | hypothetical protein LOC201895 |
| 226608_at; 242555_at | LOC388272 | similar to RIKEN cDNA 4921524J17 |
| 221195_at; 227268_at; 221194_s_at | LOC51136; /// DHX40P | PTD016 protein /// DEAH (Asp-Glu-Ala-His) box polypeptide 40 |
| | | pseudogene |
| 220341_s_at | LOC51149 | hypothetical LOC51149 |
| 1566902_at; 1566903_at; 1569933_at; | LRP8 | Low density lipoprotein receptor-related protein 8, apolipoprotein e receptor |
| 205282_at; 208433_s_at | | |
| 202736_s_at; 202737_s_at | LSM4 | LSM4 homolog, U6 small nuclear RNA associated (S. cerevisiae) |
| 205036_at; 241845_at | LSM6 | LSM6 homolog, U6 small nuclear RNA associated (S. cerevisiae) |
| 1566267_at; 202728_s_at; 202729_s_at; | LTBP1 | Latent transforming growth factor beta binding protein 1 |
| 240858_at | | |
| 219588_s_at | LUZP5 | leucine zipper protein 5 |
| 1554768_a_at; 203362_s_at | MAD2L1 | MAD2 mitotic arrest deficient-like 1 (yeast) |
| 224378_x_at; 227219_x_at; 232011_s_at | MAP1LC3A | microtubule-associated protein 1 light chain 3 alpha /// microtubule- |
| | | associated protein 1 light chain 3 alpha |
| 228468_at | MASTL | microtubule associated serine/threonine kinase-like |
| 202107_s_at | MCM2 | MCM2 minichromosome maintenance deficient 2, mitotin (S. cerevisiae) |
| 201555_at | MCM3 | MCM3 minichromosome maintenance deficient 3 (S. cerevisiae) |
| 212141_at; 212142_at; 222036_s_at; | MCM4 | MCM4 minichromosome maintenance deficient 4 (S. cerevisiae) |
| 222037_at | | |
| 201755_at; 216237_s_at | MCM5 | MCM5 minichromosome maintenance deficient 5, cell division cycle 46 |
| | | (S. cerevisiae) |
| 201930_at; 238977_at | MCM6 | MCM6 minichromosome maintenance deficient 6 (MIS5 homolog, |
| | | S. pombe) (S. cerevisiae) |
| 208795_s_at; 210983_s_at | MCM7 | MCM7 minichromosome maintenance deficient 7 (S. cerevisiae) |
| 204825_at | MELK | maternal embryonic leucine zipper kinase |
| 1562830_at; 1565898_at; 1565900_at; | METT5D1 | Methyltransferase 5 domain containing 1 |
| 1566278_at; 1567663_at; 1567664_at; | | |
| 238773_at; 242247_at; 243736_at | | |
| 237046_x_at | MGC34647 | hypothetical protein MGC34647 |
| 212020_s_at; 212021_s_at; 212022_s_at; | MKI67 | antigen identified by monoclonal antibody Ki-67 |
| 212023_s_at; | | |
| 206426_at; 206427_s_at | MLANA | melan-A |
| 218883_s_at; 229304_s_at; 229305_at | MLF1IP | MLF1 interacting protein |
| 238025_at | MLKL | mixed lineage kinase domain-like |
| 1556306_at; 223189_x_at; 223190_s_at; | MLL5 | Myeloid/lymphoid or mixed-lineage leukemia 5 (trithorax homolog, |
| 226100_at | | Drosophila) |
| 218211_s_at; 229150_at | MLPH | melanophilin |
| 205680_at | MMP10 | matrix metallopeptidase 10 (stromelysin 2) |
| 205828_at | MMP3 | matrix metallopeptidase 3 (stromelysin 1, progelatinase) |
| 205235_s_at | MPHOSPH1 | M-phase phosphoprotein 1 |
| 205429_s_at | MPP6 | membrane protein, palmitoylated 6 (MAGUK p55 subfamily member 6) |
| 205395_s_at; 211334_at; 242456_at | MRE11A | MRE11 meiotic recombination 11 homolog A (S. cerevisiae) |
| 1554126_at; 1554127_s_at; 1566481_at; | MSRB3 | methionine sulfoxide reductase B3 |
| 1566482_at; 225782_at; 225790_at; | | |
| 238583_at | | |
| 206800_at; 217070_at; 217071_s_at; | MTHFR | 5,10-methylenetetrahydrofolate reductase (NADPH) |
| 226929_at; 239035_at | | |
| 204101_at; 234596_at; 234600_at; | MTM1 | myotubularin 1 |
| 36920_at | | |
| 213422_s_at; 228576_s_at | MXRA8 | matrix-remodelling associated 8 |
| 205951_at | MYH1 | myosin, heavy polypeptide 1, skeletal muscle, adult |
| 220319_s_at; 223129_x_at; 223130_s_at; | MYLIP | myosin regulatory light chain interacting protein |
| 227707_at; 228097_at; 228098_s_at | | |
| 218189_s_at; 241923_x_at | NANS | N-acetylneuraminic acid synthase (sialic acid synthase) |
| 201969_at; 201970_s_at; 242918_at | NASP | nuclear autoantigenic sperm protein (histone-binding) |
| 209159_s_at | NDRG4 | NDRG family member 4 |
| 1566114_at; 1566115_at; 212445_s_at; | NEDD4L | Neural precursor cell expressed, developmentally down-regulated 4-like |
| 212448_at | | |
| 219502_at | NEIL3 | nei endonuclease VIII-like 3 (E. coli) |
| 204641_at; 211080_s_at | NEK2 | NIMA (never in mitosis gene a)-related kinase 2 |
| 1567013_at; 1567014_s_at; 1567015_at; | NFE2L2 | nuclear factor (erythroid-derived 2)-like 2 |
| 201146_at; 239240_at; 243113_at | | |
| 203574_at | NFIL3 | nuclear factor, interleukin 3 regulated |
| 203927_at | NFKBIE | nuclear factor of kappa light polypeptide gene enhancer in B-cells inhibitor, |
| | | epsilon |
| 201577_at; 226797_at | NME1 | non-metastatic cells 1, protein (NM23A) expressed in |
| 204501_at; 214321_at | NOV | nephroblastoma overexpressed gene |
| 213040_s_at; 217041_at | NPTXR | neuronal pentraxin receptor |
| 203814_s_at; 244855_at | NQO2 | NAD(P)H dehydrogenase, quinone 2 |
| 204589_at | NUAK1 | NUAK family, SNF1-like kinase, 1 |
| 203978_at | NUBP1 | nucleotide binding protein 1 (MinD homolog, E. coli) |
| 218768_at | NUP107 | nucleoporin 107 kDa |
| 1556432_at; 202184_s_at; 233420_at; | NUP133 | Nucleoporin 133 kDa |
| 233421_s_at; 236905_at | | |
| 212247_at; 222382_x_at | NUP205 | nucleoporin 205 kDa |
| 202188_at; 241758_at | NUP93 | nucleoporin 93 kDa |
| 1562163_at; 218039_at; 219978_s_at | NUSAP1 | Nucleolar and spindle associated protein 1 |
| 219100_at; 240824_at | OBFC1 | oligonucleotide/oligosaccharide-binding fold containing 1 |
| 218730_s_at; 222722_at | OGN | osteoglycin (osteoinductive factor, mimecan) |
| 219105_x_at | ORC6L | origin recognition complex, subunit 6 like (yeast) |
| 1558017_s_at; 204004_at; 204005_s_at; | PAWR | PRKC, apoptosis, WT1, regulator |
| 214090_at; 214237_x_at; 226223_at; | | |
| 226231_at; 229515_at | | |
| 219148_at | PBK | PDZ binding kinase |
| 207838_x_at; 212259_s_at; 214176_s_at; | PBXIP1 | pre-B-cell leukemia transcription factor interacting protein 1 |
| 214177_s_at | | |
| 219295_s_at | PCOLCE2 | procollagen C-endopeptidase enhancer 2 |
| 1563467_at; 218718_at; 222719_s_at | PDGFC | Platelet derived growth factor C |
| 205251_at; 208518_s_at; 242892_at | PER2 | period homolog 2 (Drosophila) |
| 207132_x_at; 210908_s_at | PFDN5 | prefoldin subunit 5 |
| 1558666_at; 210617_at | PHEX | Phosphate regulating endopeptidase homolog, X-linked (hypophosphatemia, |
| | | vitamin D resistant rickets) |
| 203335_at | PHYH | phytanoyl-CoA 2-hydroxylase |
| 205281_s_at; 215969_at | PIGA | phosphatidylinositol glycan, class A (paroxysmal nocturnal |
| | | hemoglobinuria) /// phosphatidylinositol glycan, class A (paroxysmal |
| | | nocturnal hemoglobinuria) |
| 209018_s_at | PINK1 | PTEN induced putative kinase 1 |
| 209019_s_at | PINK1 | PTEN induced putative kinase 1 |
| 218644_at | PLEK2 | pleckstrin 2 |
| 202240_at | PLK1 | polo-like kinase 1 (Drosophila) |
| 201429_s_at | PLK1 /// RPL37A | polo-like kinase 1 (Drosophila) /// ribosomal protein L37a |
| 204886_at; 204887_s_at; 211088_s_at | PLK4 | polo-like kinase 4 (Drosophila) |
| 209034_at | PNRC1 | proline-rich nuclear receptor coactivator 1 |
| 203422_at | POLD1 | polymerase (DNA directed), delta 1, catalytic subunit 125 kDa |
| 1560509_at; 1561940_at216026_s_at | POLE | Polymerase (DNA directed), epsilon |
| 205909_at | POLE2 | polymerase (DNA directed), epsilon 2 (p59 subunit) |
| 1555777_at; 1555778_a_at; 210809_s_at; | POSTN | periostin, osteoblast specific factor |
| 214981_at; 228481_at | | |
| 235113_at; 242154_x_at | PPIL5 | peptidylprolyl isomerase (cyclophilin)-like 5 |
| 218009_s_at | PRC1 | protein regulator of cytokinesis 1 |
| 205053_at | PRIM1 | primase, polypeptide 1, 49 kDa |
| 207505_at | PRKG2 | protein kinase, cGMP-dependent, type II |
| 203650_at; 234340_at; 234346_x_at | PROCR | protein C receptor, endothelial (EPCR) |
| 220892_s_at; 223062_s_at | PSAT1 | phosphoserine aminotransferase 1 |
| 211663_x_at; 211748_x_at; 212187_x_at | PTGDS | prostaglandin D2 synthase 21 kDa (brain) /// prostaglandin D2 synthase |
| | | 21 kDa (brain) |
| 206084_at; 210675_s_at | PTPRR | protein tyrosine phosphatase, receptor type, R |
| 203554_x_at | PTTG1 | pituitary tumor-transforming 1 |
| 210127_at; 221792_at; 225259_at | RAB6B | RAB6B, member RAS oncogene family |
| 222077_s_at | RACGAP1 | Rac GTPase activating protein 1 |
| 223417_at; 224200_s_at; 238670_at; | RAD18 | RAD18 homolog (S. cerevisiae) |
| 238748_at | | |
| 205023_at; 205024_s_at | RAD51 | RAD51 homolog (RecA homolog, E. coli) (S. cerevisiae) |
| 204146_at | RAD51AP1 | RAD51 associated protein 1 |
| 1553535_a_at; 212125_at; 212127_at | RANGAP1 | Ran GTPase activating protein 1 |
| 1555003_at; 1555004_a_at; 1559307_s_at | RBL1 | retinoblastoma-like 1 (p107) |
| 1555639_a_at; 204178_s_at | RBM14 | RNA binding motif protein 14 |
| 206499_s_at; 215747_s_at | RCC1 | regulator of chromosome condensation 1 |
| 204023_at | RFC4 | replication factor C (activator 1) 4, 37 kDa |
| 203209_at; 203210_s_at | RFC5 | replication factor C (activator 1) 5, 36.5 kDa |
| 1556662_at | RHOQ | Ras homolog gene family, member Q |
| 1556663_s_at; 1559582_at; 212117_at; | RHOQ | Ras homolog gene family, member Q |
| 212119_at; 212120_at; 214449_s_at; | | |
| 239258_at | | |
| 212122_at | RHOQ /// LOC284988 | ras homolog gene family, member Q /// hypothetical LOC284988 |
| 201756_at | RPA2 | replication protein A2, 32 kDa |
| 208768_x_at; 214042_s_at; 220960_x_at; | RPL22 | ribosomal protein L22 |
| 221726_at; 221775_x_at; 237940_s_at; | | |
| 237941_at | | |
| 201476_s_at; 201477_s_at | RRM1 | ribonucleotide reductase M1 polypeptide |
| 201890_at; 209773_s_at | RRM2 | ribonucleotide reductase M2 polypeptide |
| 231895_at | SASS6 | spindle assembly 6 homolog (C. elegans) |
| 1552256_a_at; 201819_at; 215834_x_at; | SCARB1 | scavenger receptor class B, member 1 |
| 215835_at; 232421_at; 233991_at; | | |
| 233994_at | | |
| 217855_x_at; 221972_s_at; 224472_x_at; | SDF4 | stromal cell derived factor 4 |
| 232032_x_at | | |
| 203070_at; 203071_at | SEMA3B | sema domain, immunoglobulin domain (Ig), short basic domain, secreted, |
| | | (semaphorin) 3B |
| 203788_s_at; 203789_s_at; 236947_at; | SEMA3C | sema domain, immunoglobulin domain (Ig), short basic domain, secreted, |
| 240815_at | | (semaphorin) 3C |
| 204614_at | SERPINB2 | serpin peptidase inhibitor, clade B (ovalbumin), member 2 |
| 223195_s_at; 223196_s_at; 1553869_at; | SESN2 | sestrin 2 |
| 235683_at; 235684_s_at; 243546_at | | |
| 220357_s_at; 230573_at | SGK2 | serum/glucocorticoid regulated kinase 2 |
| 1553690_at; 231938_at | SGOL1 | shugoshin-like 1 (S. pombe) |
| 230165_at; 235425_at | SGOL2 | shugoshin-like 2 (S. pombe) |
| 219493_at | SHCBP1 | SHC SH2-domain binding protein 1 |
| 203625_x_at; 203626_s_at; 210567_s_at | SKP2 | S-phase kinase-associated protein 2 (p45) |
| 209610_s_at; 209611_s_at; 212810_s_at; | SLC1A4 | solute carrier family 1 (glutamate/neutral amino acid transporter), member 4 |
| 212811_x_at; 235875_at; 244377_at | | |
| 1569121_at; 204342_at; 241229_at; | SLC25A24 | solute carrier family 25 (mitochondrial carrier; phosphate carrier), member |
| 244481_at | | 24 |
| 212907_at; 228181_at; 242716_at | SLC30A1 | Solute carrier family 30 (zinc transporter), member 1 |
| 225295_at; 226444_at; 238968_at | SLC39A10 | solute carrier family 39 (zinc transporter), member 10 |
| 1554332_a_at; 219911_s_at; 229239_x_at | SLCO4A1 | Solute carrier organic anion transporter family, member 4A1 |
| 204240_s_at; 213253_at | SMC2L1 | SMC2 structural maintenance of chromosomes 2-like 1 (yeast) |
| 201663_s_at; 201664_at;; 215623_x_at; | SMC4L1 | SMC4 structural maintenance of chromosomes 4-like 1 (yeast) |
| 237246_at | | |
| 1553148_a_at; 213292_s_at; 215366_at; | SNX13 | sorting nexin 13 |
| 215820_x_at | | |
| 203509_at; 230707_at | SORL1 | sortilin-related receptor, L(DLR class) A repeats-containing |
| 203145_at | SPAG5 | sperm associated antigen 5 |
| 235572_at | SPBC24 | spindle pole body component 24 homolog (S. cerevisiae) |
| 209891_at | SPBC25 | spindle pole body component 25 homolog (S. cerevisiae) |
| 218817_at; 222753_s_at | SPCS3 | signal peptidase complex subunit 3 homolog (S. cerevisiae) |
| 202400_s_at; 202401_s_at | SRF | serum response factor (c-fos serum response element-binding transcription |
| | | factor) |
| 205542_at | STEAP1 | six transmembrane epithelial antigen of the prostate 1 |
| 200783_s_at; 217714_x_at | STMN1 | stathmin 1/oncoprotein 18 |
| 224724_at; 233555_s_at | SULF2 | sulfatase 2 |
| 218619_s_at | SUV39H1 | suppressor of variegation 3-9 homolog 1 (Drosophila) |
| 1554572_a_at; 219262_at | SUV39H2 | suppressor of variegation 3-9 homolog 2 (Drosophila) |
| 202796_at; 235128_at; 235914_at | SYNPO | synaptopodin |
| 1569487_at; 218308_at | TACC3 | Transforming, acidic coiled-coil containing protein 3 |
| 233320_at | TCAM1 | testicular cell adhesion molecule 1 homolog (mouse) |
| 204043_at | TCN2 | transcobalamin II; macrocytic anemia |
| 206943_at; 224793_s_at; 236561_at; | TGFBR1 | transforming growth factor, beta receptor I (activin A receptor type II-like |
| 239605_x_at | | kinase, 53 kDa) |
| 206409_at; 213135_at; 231536_at | TIAM1 | T-cell lymphoma invasion and metastasis 1 |
| 203046_s_at; 215455_at | TIMELESS | timeless homolog (Drosophila) |
| 1554408_a_at; 202338_at; 243103_at | TK1 | thymidine kinase 1, soluble |
| 204872_at; 214688_at; 216997_x_at; | TLE4 | transducin-like enhancer of split 4 (E(sp1) homolog, Drosophila) |
| 233575_s_at; 235765_at | | |
| 218073_s_at; 234672_s_at | TMEM48 | transmembrane protein 48 |
| 203508_at | TNFRSF1B | tumor necrosis factor receptor superfamily, member 1B |
| 201812_s_at | TOMM7 /// LOC201725 | translocase of outer mitochondrial membrane 7 homolog (yeast) /// |
| | | hypothetical protein LOC201725 |
| 201291_s_at; 201292_at; 237469_at | TOP2A | topoisomerase (DNA) II alpha 170 kDa |
| 1561924_at; 202633_at | TOPBP1 | Topoisomerase (DNA) II binding protein 1 |
| 210052_s_at | TPX2 | TPX2, microtubule-associated, homolog (Xenopus laevis) |
| 1555788_a_at; 218145_at | TRIB3 | tribbles homolog 3 (Drosophila) |
| 233669_s_at | TRIM54 | tripartite motif-containing 54 |
| 227801_at; 235476_at | TRIM59 | tripartite motif-containing 59 |
| 204033_at | TRIP13 | thyroid hormone receptor interactor 13 |
| 1568596_a_at; 204649_at | TROAP | trophinin associated protein (tastin) |
| 204822_at | TTK | TTK protein kinase |
| 226181_at | TUBE1 | tubulin, epsilon 1 |
| 201008_s_at; 201009_s_at; 201010_s_at | TXNIP | thioredoxin interacting protein |
| 1558356_at; 223279_s_at; 236715_x_at; | UACA | uveal autoantigen with coiled-coil domains and ankyrin repeats |
| 238868_at | | |
| 1294_at; 203281_s_at | UBE1L | ubiquitin-activating enzyme E1-like |
| 202954_at | UBE2C | ubiquitin-conjugating enzyme E2C |
| 223229_at | UBE2T | ubiquitin-conjugating enzyme E2T (putative) |
| 203343_at | UGDH | UDP-glucose dehydrogenase |
| 225655_at | UHRF1 | ubiquitin-like, containing PHD and RING finger domains, 1 |
| 202706_s_at; 202707_at; 215165_x_at | UMPS | uridine monophosphate synthetase (orotate phosphoribosyl transferase and |
| | | orotidine-5′-decarboxylase) |
| 226899_at; 239136_at | UNC5B | unc-5 homolog B (C. elegans) |
| 202412_s_at; 202413_s_at; 244520_at | USP1 | ubiquitin specific peptidase 1 |
| 201099_at; 201100_s_at; 229573_at | USP9X | ubiquitin specific peptidase 9, X-linked |
| 209822_s_at | VLDLR | very low density lipoprotein receptor |
| 1553778_at | WBSCR27 | Williams Beuren syndrome chromosome region 27 |
| 204727_at; 204728_s_at; 216228_s_at | WDHD1 | WD repeat and HMG-box DNA binding protein 1 |
| 209592_s_at; 221744_at; 221745_at; | WDR68 | WD repeat domain 68 |
| 224730_at; 224748_at; 233782_at; | | |
| 236134_at; 240675_at | | |
| 1557780_at; 209052_s_at; 209053_s_at; | WHSC1 | Wolf-Hirschhorn syndrome candidate 1 |
| 209054_s_at; 222777_s_at; 222778_s_at; | | |
| 223472_at; 242311_x_at; 244140_at | | |
| 221783_at; 221784_at; 221785_at; | WIZ | widely-interspaced zinc finger motifs |
| 52005_at | | |
| 1552737_s_at;; 1554580_a_at; | WWP2 | WW domain containing E3 ubiquitin protein ligase 2 |
| 204022_at; 210200_at; 240384_at; | | |
| 241125_at; 243787_at | | |
| 1560386_at; 208775_at; 217577_at; | XPO1 | Exportin 1 (CRM1 homolog, yeast) |
| 217578_at | | |
| 218069_at | XTP3TPA | XTP3-transactivated protein A |
| 223179_at; 232077_s_at | YPEL3 | yippee-like 3 (Drosophila) |
| 219312_s_at; 222863_at; 233899_x_at; | ZBTB10 | zinc finger and BTB domain containing 10 |
| 235491_at; 235726_at; 242174_at | | |
| 1563502_at; 222730_s_at; 222731_at; | ZDHHC2 | Zinc finger, DHHC-type containing 2 |
| 243528_at | | |
| 201531_at | ZFP36 | zinc finger protein 36, C3H type, homolog (mouse) |
| 218349_s_at; 222606_at | ZWILCH | Zwilch, kinetochore associated, homolog (Drosophila) |

[0107] The Brd4 signature for the Dutch Rosetta cohort is generated by matching the gene symbols from the mouse dataset to the published Hu25K chip annotation files.

[0108] Analysis of tumor gene expression from breast cancer datasets is performed using BRB ArrayTools. Affymetrix datasets are downloaded from the NCBI Gene Expression Omnibus (GEO). The Dutch data set is downloaded from the Rosetta Company website. Expression data are loaded into BRB ArrayTools using the Affymetrix GeneChip Probe Level Data option or the Data Import Wizard. Data are filtered to exclude any probe set that is not a component of the Brd4 signature, and to eliminate any probe set whose expression variation across the data set was P>0.01.

[0109] The resulting gene signature for the five data sets consequently varies from 235-346 probe sets. Human BRD4 profiles are then used for unsupervised clustering of publicly available datasets into two groups representing high and low levels of BRD4 activation in patient samples. Specifically, unsupervised clustering of each dataset is performed using the Samples Only clustering option of BRB ArrayTools. Clustering is performed using average linkage, the centered correlation metric and center the genes analytical option. Samples are assigned into two groups based on the first bifurcation of the cluster dendogram, and Kaplan-Meier survival analysis performed using the Survival module of the software package Statistica to investigate whether there was a survival difference between the two groups. Significance of survival analyses is performed using the Cox F-test.

[0110] The Brd4 signature consistently and robustly predicts survival and/or relapse in four separate breast cancer microarray datasets performed on Affymetrix GeneChips. A significant difference in the overall likelihood of survival is observed in the GSE1456 dataset with 8-year survival being 95.9% vs. 65.5% for the good and poor prognosis Brd4 signatures, respectively (FIG. 1A). A similar effect is observed in the GSE3494 dataset with 12-year survival being 80.6% vs. 57.5% for the good and poor prognosis Brd4 signatures, respectively (FIG. 1B). The endpoint for the GSE2034 and GSE4922 differ in that disease-free survival is measured. A similar effect is seen in both cohorts with 10-year disease free survival being 68.9% vs. 54.2% in the GSE2034 dataset (FIG. 1C), and 71.3% vs. 47.6% in the GSE4922 dataset (FIG. 1D) for the good and poor prognosis Brd4 signatures, respectively.

[0111] The Brd4 signature is also highly predictive of overall survival in the Dutch Rosetta dataset, with the overall survival being estimated to be 78.5% vs. 45.1% for the good and poor prognosis Brd4 signatures, respectively (Brd4 signature hazard ratio=5.50, 95% confidence interval [CI]=3.12-9.69; FIG. 1E). Indeed, it would appear that the Brd4 signature possesses a slightly greater ability to predict survival in this dataset than the 70-gene signature described by van't Veer et al (van't Veer et al., Nature 415: 530-536 (2002); FIG. 1F). Specifically, the survival for the good and poor prognosis 70-gene signatures are estimated to be 72.6% vs. 47.0%, respectively (70 gene signature hazard ratio=4.49, 95% CI=2.65-7.61).

[0112] Characterization of Brd4 signature genes associate with survival in each of the breast cancer datasets reveal overlapping, but not identical gene expression signatures (Table 8).

TABLE 8

| | | Hazard Ratio | | | | | |
|---|---|---|---|---|---|---|---|
| Probe Set ID | Gene Symbol | GSE1456 | GSE2034 | GSE3494 | GSE4922 | Dutch Brd4 Sig | Dutch 70 Gene Sig |
| 208747_s_at | C1S | 0.7 | | 0.6 | 0.7 | | |
| 205022_s_at | CHES1 | 0.5 | | | | | |
| 218031_s_at | CHES1 | 0.5 | | 0.5 | 0.6 | | |
| 200810_s_at | CIRBP | 0.4 | | 0.6 | | 0.1 | |
| 200811_at | CIRBP | 0.5 | | 0.6 | 0.7 | 0.1 | |
| 214724_at | DIXDC1 | 0.4 | | 0.5 | | | |
| 215719_x_at | FAS | 0.3 | 0.8 | 0.5 | | | |
| 204781_s_at | FAS | 0.4 | | 0.5 | 0.5 | | |
| 216252_x_at | FAS | 0.4 | | 0.4 | 0.5 | | |
| 205498_at | GHR | 0.7 | | 0.7 | | | |
| 202615_at | GNAQ | 0.5 | | | | | |
| 201124_at | ITGB5 | 0.5 | | 0.6 | | 0.4 | |
| 213422_s_at | MXRA8 | 0.6 | | 0.6 | | | |
| 212448_at | NEDD4L | 0.3 | | | | | |
| 218730_s_at | OGN | 0.5 | | | | 0.3 | |
| 214177_s_at | PBXIP1 | 0.3 | | | | | |
| 221726_at | RPL22 | 0.3 | | | | 0.2 | |
| 214042_s_at | RPL22 | 0.3 | | | | 0.2 | |
| 203509_at | SORL1 | 0.3 | | 0.6 | 0.6 | 0.3 | |
| 202796_at | SYNPO | 0.3 | | 0.4 | 0.6 | | |
| 204872_at | TLE4 | 0.4 | | 0.6 | | | |
| 201010_s_at | TXNIP | 0.5 | | 0.5 | 0.6 | | |
| 201009_s_at | TXNIP | 0.5 | 0.7 | 0.6 | 0.7 | | |
| 201008_s_at | TXNIP | 0.6 | 0.7 | 0.7 | 0.7 | | |
| 218115_at | ASF1B | 3.9 | | 3.0 | 2.2 | | |
| 219918_s_at | ASPM | 1.9 | 1.4 | 1.4 | 1.3 | | |
| 202672_s_at | ATF3 | | 0.8 | | | | |
| 204092_s_at | AURKA | 2.3 | | 1.6 | 1.3 | | |
| 208079_s_at | AURKA | 1.8 | 1.5 | 1.5 | 1.4 | | |
| 209464_at | AURKB | 2.2 | | 1.6 | 1.5 | | |
| 202095_s_at | BIRC5 | 1.7 | 1.3 | 1.6 | 1.6 | 6.3 | |
| 210334_x_at | BIRC5 | 2.3 | | | | 6.3 | |
| 205733_at | BLM | | | 1.8 | | 10.4 | |
| 204531_s_at | BRCA1 | | 1.3 | | | | |
| 212949_at | BRRN1 | 3.2 | 1.2 | 3.0 | 2.3 | | |
| 209642_at | BUB1 | 2.5 | 1.5 | 1.5 | 1.4 | 8.6 | |
| 215509_s_at | BUB1 | 3.8 | | | | 8.6 | |
| 216275_at | BUB1 | | 0.8 | | | 8.6 | |
| 203755_at | BUB1B | 2.3 | | 1.7 | 1.7 | 17.1 | |
| 202763_at | CASP3 | | | 2.7 | 2.9 | | |
| 203418_at | CCNA2 | 2.9 | | 1.8 | 1.6 | 3.7 | |
| 213226_at | CCNA2 | 2.1 | 1.7 | 1.9 | 1.9 | 3.7 | |
| 214710_s_at | CCNB1 | 2.3 | | 1.9 | 1.7 | 11.8 | |
| 202705_at | CCNB2 | 2.8 | 1.4 | 2.1 | 1.8 | 12.3 | |
| 205034_at | CCNE2 | 1.5 | 1.5 | 1.5 | 1.4 | 8.2 | 8.2 |
| 211814_s_at | CCNE2 | 2.2 | | 2.0 | 2.1 | 8.2 | 8.2 |
| 202870_s_at | CDC20 | 1.8 | 1.3 | 1.5 | 1.4 | 11.8 | |
| 201853_s_at | CDC25B | 2.1 | | 1.7 | 1.5 | 8.8 | |
| 1570624_at | CDC25C | | | | | 5.6 | |
| 204126_s_at | CDC45L | 4.1 | | 2.5 | 2.6 | 15.8 | |
| 203967_at | CDC6 | 1.9 | | | 1.3 | 2.9 | |
| 203968_s_at | CDC6 | 1.8 | | | | 2.9 | |
| 204510_at | CDC7 | 1.9 | | | | | |
| 221436_s_at | CDCA3 | 2.2 | 1.2 | | | | |
| 221520_s_at | CDCA8 | 2.5 | 1.2 | 1.8 | 1.7 | | |
| 209714_s_at | CDKN3 | 2.5 | | 2.1 | 1.9 | 11.4 | |
| 204962_s_at | CENPA | 1.7 | 1.4 | 1.5 | 1.4 | 8.7 | 8.7 |
| 205046_at | CENPE | 2.9 | 1.3 | 1.8 | 1.5 | 2.9 | |
| 207828_s_at | CENPF | 2.1 | 1.3 | 1.5 | 1.4 | 5.1 | |
| 209172_s_at | CENPF | 2.2 | | 1.6 | 1.5 | 5.1 | |
| 205393_s_at | CHEK1 | 2.5 | | | | 6.3 | |
| 205394_at | CHEK1 | 2.4 | | | 1.7 | 6.3 | |
| 204233_s_at | CHKA | 2.3 | | | | | |
| 218252_at | CKAP2 | | | 2.0 | 2.1 | 3.1 | |
| 204170_s_at | CKS2 | 1.5 | | 1.6 | 1.5 | 3.4 | |
| 201572_x_at | DCTD | | | 0.3 | | | |
| 210137_s_at | DCTD | | | 0.4 | | | |
| 202887_s_at | DDIT4 | | | 1.6 | 1.4 | | |
| 203764_at | DLG7 | 2.2 | 1.6 | 1.5 | 1.4 | | |
| 213647_at | DNA2L | | | 2.3 | 2.1 | 6.3 | |
| 204817_at | ESPL1 | 3.5 | | 2.5 | 2.3 | | |
| 38158_at | ESPL1 | 3.7 | | 3.1 | 2.8 | | |
| 216375_s_at | ETV5 | | 0.8 | | | | |
| 204603_at | EXO1 | 4.3 | | | | 16.6 | |
| 209692_at | EYA2 | 2.0 | | | | | |
| 203358_s_at | EZH2 | 1.8 | 1.4 | | 1.5 | 12.7 | |
| 204780_s_at | FAS | | | 0.5 | 0.7 | | |
| 218875_s_at | FBXO5 | 2.1 | | 1.8 | 1.7 | | |
| 204767_s_at | FEN1 | 2.6 | | 1.7 | 1.8 | 26.3 | |
| 204768_s_at | FEN1 | 2.4 | | 1.7 | | 26.3 | |
| 209189_at | FOS | | | 0.7 | 0.8 | 0.4 | |
| 203725_at | GADD45A | | | 0.4 | | | |
| 203178_at | GATM | | | 0.5 | 0.6 | | |
| 216733_s_at | GATM | 1.6 | | 0.5 | 0.7 | | |
| 213094_at | GPR126 | | | | 1.3 | | |
| 209398_at | HIST1H1C | 1.4 | | 1.2 | 1.2 | | |
| 206074_s_at | HMGA1 | 2.2 | | 2.6 | 2.0 | | |
| 210457_x_at | HMGA1 | | 0.8 | | | | |
| 208808_s_at | HMGB2 | | | 1.9 | 1.7 | | |
| 207165_at | HMMR | 1.7 | 1.6 | 1.6 | 1.8 | 6.9 | |
| 209709_s_at | HMMR | 2.1 | | 2.3 | 2.1 | 6.9 | |
| 205543_at | HSPA4L | 2.3 | | | | | |
| 204444_at | KIF11 | 1.5 | | 1.6 | 1.5 | | |
| 221258_s_at | KIF18A | | | 2.2 | 2.0 | | |
| 218755_at | KIF20A | 3.1 | | 1.9 | 1.6 | | |
| 216969_s_at | KIF22 | 2.7 | | | | | |
| 204709_s_at | KIF23 | 2.5 | 1.3 | 2.2 | 1.8 | | |
| 209408_at | KIF2C | 2.3 | | 1.8 | 1.6 | | |
| 211519_s_at | KIF2C | 3.3 | | 2.2 | 1.8 | | |
| 204162_at | KNTC2 | | | 1.6 | 1.4 | | |
| 201088_at | KPNA2 /// LOC643995 | 2.0 | | 1.6 | 1.6 | | |
| 211762_s_at | KPNA2 /// LOC643995 | 1.9 | | 1.4 | 1.5 | | |
| 203041_s_at | LAMP2 | 2.3 | | | | 4.1 | |
| 221581_s_at | LAT2 | | | 0.4 | | | |
| 202726_at | LIG1 | 3.3 | | 2.0 | 2.0 | | |
| 202736_s_at | LSM4 | 1.5 | | 1.7 | 1.4 | 5.8 | |
| 202737_s_at | LSM4 | 1.6 | | 2.0 | 1.6 | 5.8 | |
| 219588_s_at | LUZP5 | 3.3 | | 1.9 | 1.9 | | |
| 203362_s_at | MAD2L1 | 1.7 | 1.5 | 1.6 | 1.5 | 7.6 | |
| 201555_at | MCM3 | 2.5 | | 1.7 | 1.6 | 68.0 | |
| 212141_at | MCM4 | 2.9 | | 2.1 | 1.8 | | |
| 212142_at | MCM4 | 3.7 | | | | | |
| 222036_s_at | MCM4 | 1.9 | | 1.7 | 1.5 | | |
| 222037_at | MCM4 | 2.1 | | 1.8 | 1.5 | | |
| 201755_at | MCM5 | 2.6 | | 1.8 | 1.7 | 11.9 | |
| 216237_s_at | MCM5 | | | | 1.6 | 11.9 | |
| 201930_at | MCM6 | 2.2 | | 1.6 | 1.7 | 15.2 | 15.2 |
| 204825_at | MELK | 2.1 | 1.4 | 1.7 | 1.6 | | |
| 212020_s_at | MKI67 | 2.0 | | 1.6 | 1.5 | 11.8 | |
| 212021_s_at | MKI67 | 3.0 | | 3.0 | 2.2 | 11.8 | |
| 212022_s_at | MKI67 | 2.3 | 1.3 | 2.0 | 1.6 | 11.8 | |
| 212023_s_at | MKI67 | | | 1.8 | 1.9 | 11.8 | |
| 218883_s_at | MLF1IP | 1.9 | | 1.7 | 1.6 | | |
| 205395_s_at | MRE11A | | 1.3 | | | | |
| 204101_at | MTM1 | | 1.2 | | | 0.02 | |
| 204641_at | NEK2 | 2.0 | 1.6 | 1.5 | 1.4 | 12.2 | |
| 211080_s_at | NEK2 | 4.3 | | | | 12.2 | |
| 201577_at | NME1 | 1.8 | | | 1.5 | | |
| 204501_at | NOV | | | 0.2 | 0.4 | | |
| 214321_at | NOV | | | 0.5 | 0.6 | | |
| 212247_at | NUP205 | 2.0 | | | | | |
| 202188_at | NUP93 | 4.6 | | 1.8 | 1.7 | | |
| 218039_at | NUSAP1 | 2.4 | | 1.8 | 1.8 | | |
| 219978_s_at | NUSAP1 | 1.9 | | 1.6 | 1.5 | | |
| 219148_at | PBK | 1.7 | 1.4 | 1.3 | 1.3 | | |
| 207838_x_at | PBXIP1 | | 0.8 | | | | |
| 202240_at | PLK1 | 3.3 | | 2.7 | 2.1 | | |
| 204886_at | PLK4 | | 1.3 | | | | |
| 204887_s_at | PLK4 | | | | 1.9 | | |
| 203422_at | POLD1 | | | | | 72.8 | |
| 205909_at | POLE2 | 3.2 | | 2.0 | 1.7 | 20.8 | |
| 210809_s_at | POSTN | | 1.3 | 0.7 | | | |
| 214981_at | POSTN | | 1.1 | | | | |
| 218009_s_at | PRC1 | 2.1 | 1.5 | 1.6 | 1.6 | 16.7 | 16.7 |
| 207505_at | PRKG2 | | 0.8 | | | | |
| 220892_s_at | PSAT1 | 2.7 | 0.8 | | | | |
| 203554_x_at | PTTG1 | 2.1 | | 2.0 | 1.8 | 27.4 | |
| 222077_s_at | RACGAP1 | 2.1 | | 2.2 | 1.9 | | |
| 205024_s_at | RAD51 | 5.7 | 1.4 | 3.5 | 3.0 | 30.3 | |
| 204146_at | RAD51AP1 | 1.8 | 1.4 | | | | |
| 206499_s_at | RCC1 | 4.4 | | 3.1 | 2.3 | | |
| 204023_at | RFC4 | 1.7 | | 1.5 | 1.6 | 12.5 | 12.5 |
| 201476_s_at | RRM1 | 1.7 | | | | 7.5 | |
| 201890_at | RRM2 | 1.8 | 1.4 | 1.7 | 1.6 | 5.6 | |
| 209773_s_at | RRM2 | 2.2 | 1.4 | 1.6 | 1.6 | 5.6 | |
| 203789_s_at | SEMA3C | | | 0.7 | | 0.3 | |
| 219493_at | SHCBP1 | 3.0 | 1.5 | 2.3 | 2.0 | | |
| 203625_x_at | SKP2 | | | 1.6 | 1.4 | | |
| 204240_s_at | SMC2L1 | 2.0 | | | | 3.6 | |
| 213253_at | SMC2L1 | | | 3.3 | 2.6 | 3.6 | |
| 201663_s_at | SMC4L1 | 2.2 | | | | 3.3 | |
| 201664_at | SMC4L1 | 1.8 | | 1.6 | 1.6 | 3.3 | |
| 203145_at | SPAG5 | 2.2 | 1.3 | 2.6 | 2.2 | | |
| 209891_at | SPBC25 | 1.8 | | 4.3 | 2.6 | | |
| 205542_at | STEAP1 | | | 0.4 | 0.6 | | |
| 200783_s_at | STMN1 | 1.9 | | 1.6 | 1.6 | 10.5 | |
| 218308_at | TACC3 | 2.4 | 1.2 | 2.4 | 2.2 | 13.8 | |
| 206943_at | TGFBR1 | | 0.8 | | | | |
| 203046_s_at | TIMELESS | 2.3 | | 2.6 | 2.2 | 35.6 | |
| 202338_at | TK1 | 2.0 | | 1.9 | 1.9 | 8.1 | |
| 201291_s_at | TOP2A | 1.4 | 1.2 | 1.3 | 1.3 | 5.0 | |
| 201292_at | TOP2A | 1.7 | 1.3 | 1.4 | 1.4 | 5.0 | |
| 237469_at | TOP2A | | | | | 5.0 | |
| 202633_at | TOPBP1 | | | | 2.0 | 11.1 | |
| 210052_s_at | TPX2 | 1.9 | | 1.7 | 1.5 | | |
| 218145_at | TRIB3 | 2.1 | | 2.2 | 1.7 | | |
| 204033_at | TRIP13 | 1.8 | | 1.9 | 1.6 | 16.8 | |
| 204649_at | TROAP | | | 2.9 | 2.4 | 160.9 | |
| 204822_at | TTK | 1.4 | 1.4 | 1.5 | 1.3 | 6.3 | |
| 202954_at | UBE2C | 2.1 | | 2.0 | 1.7 | | |
| 216228_s_at | WDHD1 | | 1.3 | | | | |
| 209052_s_at | WHSC1 | 2.4 | | | | | |
| 209053_s_at | WHSC1 | 2.0 | | 1.8 | 1.9 | | |
| 209054_s_at | WHSC1 | | | | 2.0 | | |
| 221785_at | WIZ | | 0.8 | | | | |
| 219312_s_at | ZBTB10 | | 1.5 | | | | |
| 218349_s_at | ZWILCH | | | 2.0 | 2.2 | | |

| Brd4 Signature Genes Predictive only in Dutch Cohort | Hazard Ratio |
|---|---|
| ANLN | 6.3 |
| CAD | 12.3 |
| CBL | 14.3 |
| CDKN2D | 8.0 |
| CENPF | 5.1 |
| CIRBP | 0.1 |
| CP | 2.0 |
| DHODH | 16.4 |
| DLEU2 | 13.5 |
| FIGNL1 | 9.3 |
| FXYD5 | 6.2 |
| H6PD | 0.1 |
| ITGB5 | 0.4 |
| LIPG | 3.6 |
| LRP8 | 4.3 |
| NFIL3 | 5.8 |
| OGN | 0.3 |
| PLEK2 | 5.5 |
| POLE | 0.4 |
| PRIM1 | 4.8 |
| RBL1 | 17.2 |
| RPL22 | 0.2 |
| SORL1 | 0.3 |
| TACC3 | 13.8 |

[0113] The vast majority of Brd4 signature probes are predictive of survival in at least two of the four Affymetrix cohorts, and hazard ratios displayed the same directionality of effect for over 99% of probes when a probe is predictive of survival in more than one cohort. The Dutch Rosetta cohort does have a number of unique predictive signature genes. Such variations likely reflect microarray platform differences, as well as population and tumor heterogeneity. Nevertheless, it is argued that in view of the overlapping nature of the Brd4 signatures in the five cohorts, as well as the finding that the Brd4 signature is the only consistent predictor of outcome on multivariate Cox proportional analysis in all of the cohorts (Table 9), that the net effect of the Brd4 signature is both consistent and robust. Table 8 lists the Brd4 signature genes predicting survival in all 5 human breast cancer cohorts.

TABLE 9

| | GSE2034 | | GSE3934 | | GSE4922 | | Rosetta | |
|---|---|---|---|---|---|---|---|---|
| | Risk | | Risk | | Risk | | Risk | |
| | ratio (95% CI) | P | ratio (95% CI) | P | ratio (95% CI) | P | ratio (95% CI) | P |
| Brd4 signature | 2.05 (1.37-3.07) | 0.0005 | 1.86 (1.06-3.27) | 0.0300 | 2.04 (1.30-3.20) | 0.0020 | 4.44 (2.42-8.12) | <0.0001 |
| Lymph node status | * | * | 2.74 (1.56-4.82) | 0.0004 | 1.49 (0.95-2.32) | 0.0800 | 1.09 (0.87-1.37) | 0.4400 |
| Tumor ER expression | 1.15 (0.91-1.44) | 0.2313 | 1.50 (0.62-3.59) | 0.3700 | 1.22 (0.65-2.30) | 0.5300 | 1.39 (1.09-1.77) | 0.0080 |
| Tumor size (<=2 cm) | * | * | 1.63 (1.15-2.30) | 0.0060 | 1.31 (1.03-1.67) | 0.0290 | 1.27 (0.80-1.97) | 0.3200 |
| 70 Gene Rosetta | * | * | * | * | * | * | 1.3 (0.79-2.02) | 0.3200 |
| Signature | | | | | | | | |

* Data not available for this cohort

[0114] This example demonstrated that the expression levels of the target molecules of Table 8 correlate with cancer survival.

### Example 3

[0115] This example demonstrates that the Brd4 signature sub-stratifies patients with node-negative and ER-positive primary tumors into good and poor outcome groups based on tumor gene expression.

[0116] The effect of the Brd4 signature gene expression upon survival in node-negative patients is determined when clinical data are available. Signature gene expression has a modest but statistically significant effect upon survival in GSE3494 node-negative patients, with overall 12-year survival being 88.0% in the good prognosis group and 66.8% in the poor prognosis group (FIG. 2A). A more dramatic effect is observed in the other three node-negative datasets. Overall survival in the Dutch Rosetta node-negative patients is 83.9% vs. 38.5% for the good and poor prognosis Brd4 signatures, respectively (FIG. 2B). Similar effects are seen in the GSE2034 lymph node negative dataset with 10-year disease free survival being 68.9% vs. 54.2% in the good and poor prognosis Brd4 signatures, respectively (FIG. 2C), and in GSE4922 node-negative patients being 75.3% vs. 52.3% for the good and poor prognosis Brd4 signatures, respectively (FIG. 2D).

[0117] A similar stratification effect by tumor Brd4 signature gene expression is observed in ER-positive patients when sufficient clinical data are available. Signature gene expression has a modest but statistically significant effect upon survival in GSE3494 ER-positive patients, with overall 12-year survival being 79.3% in the good prognosis group and 54.3% in the poor prognosis group (FIG. 2E). Signature gene expression has a stronger effect in two of the three ER-positive datasets, with an overall survival in the Dutch Rosetta ER-positive patients being 78.4% vs. 54.4% for the good and poor prognosis Brd4 signatures, respectively (FIG. 2F). Furthermore, disease-free survival in GSE2034 ER-positive patients is estimated as being 68.4% vs. 48.5% for the good and poor prognosis Brd4 signatures, respectively (FIG. 2G). The GSE4922 dataset contains insufficient numbers of ER positive subjects and are subsequently too underpowered to detect any significant effect of signature gene expression upon disease-free survival (FIG. 2H).

[0118] This example demonstrated that detection of the gene expression levels of genes of Table 8 correlate with certain tumor characteristics.

### Example 4

[0119] This example demonstrates the microarray analysis of mouse Mvt-1 cell lines ectopically expressing Anakin.

[0120] Affymetrix microarrays are used to compare gene expression in four Mvt-1/Anakin clonal isolates and three Mvt-1/β-galactosidase clonal isolates. An Anakin expression signature is identified using the Class Comparison tool of BRB ArrayTools is performed, using a two-sample t-test with random variance univariate test. P-values for significance are computed based on 10,000 random permutations, at a nominal significance level of each univariate test of 0.0001. A total of 1,739 probe sets representing 1346 genes passed these conditions. Examples of significantly up-regulated and down-regulated probes according to these criteria are listed in Tables 10 and 11, respectively.

TABLE 10

| | Fold difference of | | | |
|---|---|---|---|---|
| | geom. means | | | |
| | (control/transfected | | | |
| | cell lines) | Probe Set ID | Gene Symbol | Description |
| 1 | 59.880 | 1453275_at | 2310002L13Rik | RIKEN cDNA 2310002L13 gene |
| 2 | 45.370 | 1422011_s_at | Xlr /// | X-linked lymphocyte-regulated complex /// RIKEN cDNA 3830403N18 gene |
| | | | 3830403N18Rik | |
| 3 | 35.231 | 1440557_at | Ipw | imprinted gene in the Prader-Willi syndrome region |
| 4 | 32.555 | 1426181_a_at | Il24 | interleukin 24 |
| 5 | 18.132 | 1426615_s_at | Ndrg4 | N-myc downstream regulated gene 4 |
| 6 | 16.046 | 1436188_a_at | Ndrg4 | N-myc downstream regulated gene 4 |
| 7 | 14.663 | 1456326_at | Gm784 | gene model 784, (NCBI) |
| 8 | 13.938 | 1450871_a_at | Bcat1 | branched chain aminotransferase 1, cytosolic |
| 9 | 12.981 | 1419082_at | Serpinb2 | serine (or cysteine) proteinase inhibitor, clade B, member 2 |
| 10 | 12.742 | 1451791_at | Tfpi | tissue factor pathway inhibitor |
| 11 | 12.488 | 1426851_a_at | Nov | nephroblastoma overexpressed gene |
| 12 | 12.135 | 1420310_at | | |
| 13 | 11.476 | 1426852_x_at | Nov | nephroblastoma overexpressed gene |
| 14 | 11.333 | 1452367_at | Coro2a | coronin, actin binding protein 2A |
| 15 | 11.260 | 1421979_at | Phex | phosphate regulating gene with homologies to endopeptidases on the |
| | | | | X chromosome |
| | | | | (hypophosphatemia, vitamin D resistant rickets) |
| 16 | 10.722 | 1416295_a_at | Il2rg | interleukin 2 receptor, gamma chain |
| 17 | 10.426 | 1443653_at | D930038M13Rik | RIKEN cDNA D930038M13 gene |
| 18 | 10.065 | 1424339_at | Oasl1 | 2′-5′ oligoadenylate synthetase-like 1 |
| 19 | 9.711 | 1451790_a_at | Tfpi | tissue factor pathway inhibitor |
| 20 | 9.565 | 1452679_at | 2410129E14Rik | RIKEN cDNA 2410129E14 gene |
| 21 | 9.376 | 1417267_s_at | Fkbp11 | FK506 binding protein 11 |
| 22 | 9.339 | 1421134_at | Areg | amphiregulin |
| 23 | 9.030 | 1416368_at | Gsta4 | glutathione S-transferase, alpha 4 |

TABLE 11

| | | | | |
|---|---|---|---|---|
| 1 | 0.002 | 1430162_at | 3830417A13Rik | RIKEN cDNA 3830417A13 gene |
| 2 | 0.018 | 1415983_at | Lcp1 | lymphocyte cytosolic protein 1 |
| 3 | 0.032 | 1418004_a_at | 1810009M01Rik | RIKEN cDNA 1810009M01 gene |
| 4 | 0.033 | 1448160_at | Lcp1 | lymphocyte cytosolic protein 1 |
| 5 | 0.036 | 1416666_at | Serpine2 | serine (or cysteine) proteinase inhibitor, clade E, member 2 |
| 6 | 0.043 | 1450678_at | Itgb2 | integrin beta 2 |
| 7 | 0.045 | 1423909_at | 0610011I04Rik | RIKEN cDNA 0610011I04 gene |
| 8 | 0.049 | 1418664_at | Mpdz | multiple PDZ domain protein |
| 9 | 0.058 | 1417848_at | MGI: 2180715 | glucocorticoid induced gene 1 |
| 10 | 0.062 | 1453152_at | Mamdc2 | MAM domain containing 2 |
| 11 | 0.063 | 1434442_at | D5Ertd593e | DNA segment, Chr 5, ERATO Doi 593, expressed |
| 12 | 0.063 | 1428891_at | 9130213B05Rik | RIKEN cDNA 9130213B05 gene |
| 13 | 0.066 | 1426858_at | Inhbb | inhibin beta-B |
| 14 | 0.068 | 1434465_x_at | Vldlr | very low density lipoprotein receptor |
| 15 | 0.073 | 1450107_a_at | Renbp | renin binding protein |
| 16 | 0.074 | 1448303_at | Gpnmb | glycoprotein (transmembrane) nmb |
| 17 | 0.075 | 1417061_at | Slc40a1 | solute carrier family 40 (iron-regulated transporter), member 1 |
| 18 | 0.088 | 1451461_a_at | Aldoc | aldolase 3, C isoform |
| 19 | 0.090 | 1434920_a_at | Evl | Ena-vasodilator stimulated phosphoprotein |
| 20 | 0.094 | 1421063_s_at | Snrpn /// Snurf | small nuclear ribonucleoprotein N /// SNRPN upstream |
| | | | | reading frame |
| 21 | 0.097 | 1450044_at | Fzd7 | frizzled homolog 7 (Drosophila) |
| 22 | 0.100 | 1416855_at | Gas1 | growth arrest specific 1 |
| 23 | 0.104 | 1434372_at | | |
| 24 | 0.106 | 1436838_x_at | Cotl1 | coactosin-like 1 (Dictyostelium) |
| 25 | 0.112 | 1420851_at | Pard6g | par-6 partitioning defective 6 homolog gamma (C. elegans) |
| 26 | 0.116 | 1449896_at | Mlph | melanophilin |
| 27 | 0.116 | 1417900_a_at | Vldlr | very low density lipoprotein receptor |
| 28 | 0.119 | 1434191_at | A530016O06Rik | RIKEN cDNA A530016O06 gene |
| 29 | 0.124 | 1450455_s_at | Akr1c12 | aldo-keto reductase family 1, member C12 |
| 30 | 0.125 | 1445597_s_at | Hrasls3 | HRAS like suppressor 3 |
| 31 | 0.127 | 1418910_at | Bmp7 | bone morphogenetic protein 7 |

[0121] A human Anakin gene expression signature is generated by mapping the differentially regulated genes from mouse array data to human Rosetta probe set annotations (van't Veer et al., Nature 415: 530-536 (2002)). One hundred and ninety six genes from the mouse data can be mapped to the available Rosetta Hu25K chip annotations. The 295 samples of the Rosetta data set (van't Veer et al., 2002, supra) are clustered into one of two groups representing high and low levels of Anakin activation in primary tumor samples in an unsupervised manner based on the 196 significantly differentially expressed Anakin signature genes on the Hu25K chip.

[0122] Of the 196 genes, 33 genes (Table 12) are identified as predictive of cancer survival in the van't Veer breast cancer cohort (van 't Veer et al., 2002, supra), 16 genes (Table 13) are identified as predictive of cancer survival in the GSE1456 breast cancer cohort, 8 genes (Table 14) are identified as predictive of cancer survival in the GSE3494 breast cancer cohort, and 3 genes (Table 15) are identified as predictive of cancer survival in the GSE4922 breast cancer cohort. The genes of Tables 12-15 correlate with the genes of Groups 1-4 of Table 1.

TABLE 12

| | Parametric p-value | FDR | Hazard Ratio | SD of log ratios | Unique id | Target Molecule |
|---|---|---|---|---|---|---|
| 1 | <1e−07 | <1e−07 | 56.154 | 0.169 | NM_001605 | AARS |
| 2 | 1.1e−05 | 0.0005325 | 5.669 | 0.275 | NM_004207 | SLC16A3 |
| 3 | 1.63e−05 | 0.0005325 | 0.125 | 0.205 | NM_001280 | CIRBP |
| 4 | 2.2e−05 | 0.000539 | 0.26 | 0.331 | NM_014246 | CELSR1 |
| 5 | 6.2e−05 | 0.0012152 | 9.327 | 0.176 | NM_003498 | SNN |
| 6 | 0.0001228 | 0.0020057 | 0.181 | 0.243 | AI819706 | Contig1951 |
| 7 | 0.0001724 | 0.0024136 | 5.296 | 0.245 | AF035284 | FADS1 |
| 8 | 0.0002729 | 0.003343 | 0.146 | 0.232 | NM_014456 | PDCD4 |
| 9 | 0.0006509 | 0.0070844 | 5.828 | 0.183 | NM_020166 | MCCC1 |
| 10 | 0.0007229 | 0.0070844 | 3.319 | 0.306 | NM_005165 | ALDOC |
| 11 | 0.0015771 | 0.0140505 | 0.219 | 0.266 | NM_000824 | GLRB |
| 12 | 0.0020862 | 0.016009 | 0.117 | 0.179 | D25304 | ARHGEF6 |
| 13 | 0.0022688 | 0.016009 | 0.38 | 0.377 | NM_000930 | PLAT |
| 14 | 0.002287 | 0.016009 | 5.716 | 0.188 | NM_003056 | SLC19A1 |
| 15 | 0.0027271 | 0.0178171 | 4.245 | 0.205 | S40706 | DDIT3 |
| 16 | 0.004977 | 0.0304841 | 2.657 | 0.282 | NM_016577 | RAB6B |
| 17 | 0.0061899 | 0.035683 | 4.603 | 0.188 | NM_001550 | IFRDI |
| 18 | 0.0067291 | 0.0366362 | 0.465 | 0.382 | NM_000931 | PLAT |
| 19 | 0.0079349 | 0.0409274 | 0.234 | 0.206 | NM_004126 | GNG11 |
| 20 | 0.0101124 | 0.0494517 | 0.294 | 0.253 | AL079298 | MCCC2 |
| 21 | 0.0105968 | 0.0494517 | 0.189 | 0.162 | NM_001560 | IL13RA1 |
| 22 | 0.0160849 | 0.0716509 | 0.245 | 0.181 | NM_003894 | PER2 |
| 23 | 0.018496 | 0.078809 | 2.035 | 0.358 | NM_001885 | CRYAB |
| 24 | 0.0219223 | 0.0895161 | 0.344 | 0.306 | NM_002147 | HOXB5 |
| 25 | 0.0242353 | 0.0950024 | 3.99 | 0.194 | AI970292 | Contig45049_RC |
| 26 | 0.0252599 | 0.0952104 | 0.297 | 0.199 | AL117599 | DKFZp564I0463 |
| 27 | 0.0297937 | 0.1081401 | 2.774 | 0.253 | NM_003234 | TFRC |
| 28 | 0.0319726 | 0.1119041 | 0.341 | 0.214 | NM_003505 | FZD1 |
| 29 | 0.0336773 | 0.113806 | 2.75 | 0.237 | NM_002298 | LCP1 |
| 30 | 0.0361845 | 0.1182027 | 0.387 | 0.241 | NM_000690 | ALDH2 |
| 31 | 0.0375725 | 0.1187776 | 2.43 | 0.165 | NM_004775 | B4GALT6 |
| 32 | 0.0408441 | 0.1248585 | 4.558 | 0.186 | NM_012257 | HBP1 |
| 33 | 0.0420442 | 0.1248585 | 4.106 | 0.164 | NM_013995 | LAMP2 |
| 34 | | | 0.3 | | NM_173872.2 | CLCN3 |
| 35 | | | 4.0 | | NM_002033.2 | FUT4 |
| 36 | | | 0.2 | | NM_014236.1 | GNPAT |

TABLE 13

| | Parametric | | Hazard | SD of log | | | | Gene |
|---|---|---|---|---|---|---|---|---|
| | p-value | FDR | Ratio | intensities | Probe set | Annotations | Description | symbol |
| 1 | 1.2e−06 | 0.0003311 | 0.223 | 0.549 | 217707_x_at | Info | SWI/SNF related, | SMARCA2 |
| | | | | | | | matrix associated, | |
| | | | | | | | actin dependent | |
| | | | | | | | regulator of | |
| | | | | | | | chromatin, subfamily | |
| | | | | | | | a, member 2 | |
| 2 | 2.2e−06 | 0.0003311 | 0.318 | 0.585 | 206542_s_at | Info | SWI/SNF related, | SMARCA2 |
| | | | | | | | matrix associated, | |
| | | | | | | | actin dependent | |
| | | | | | | | regulator of | |
| | | | | | | | chromatin, subfamily | |
| | | | | | | | a, member 2 | |
| 3 | 4.5e−06 | 0.0004515 | 5.194 | 0.399 | 201000_at | Info | alanyl-tRNA | AARS |
| | | | | | | | synthetase | |
| 4 | 4.94e−05 | 0.0030702 | 0.234 | 0.424 | 201648_at | Info | Janus kinase 1 (a | JAK1 |
| | | | | | | | protein tyrosine | |
| | | | | | | | kinase) | |
| 5 | 5.1e−05 | 0.0030702 | 4.726 | 0.452 | 219575_s_at | Info | peptide deformylase- | PDF /// |
| | | | | | | | like protein /// | COG8 |
| | | | | | | | component of | |
| | | | | | | | oligomeric golgi | |
| | | | | | | | complex 8 | |
| 6 | 7.04e−05 | 0.0033562 | 6.876 | 0.37 | 218107_at | Info | WD repeat domain 26 | WDR26 |
| 7 | 7.93e−05 | 0.0033562 | 4.621 | 0.382 | 202188_at | Info | nucleoporin 93 kDa | NUP93 |
| 8 | 8.92e−05 | 0.0033562 | 2.817 | 0.667 | 201584_s_at | Info | DEAD (Asp-Glu-Ala- | DDX39 |
| | | | | | | | Asp) box polypeptide | |
| | | | | | | | 39 | |
| 9 | 0.0001162 | 0.0038862 | 5.956 | 0.362 | 203612_at | Info | bystin-like | BYSL |
| 10 | 0.0002035 | 0.0061254 | 0.447 | 1.09 | 218087_s_at | Info | sorbin and SH3 | SORBS1 |
| | | | | | | | domain containing 1 | |
| 11 | 0.0003349 | 0.0091641 | 0.16 | 0.412 | 213306_at | Info | multiple PDZ domain | MPDZ |
| | | | | | | | protein | |
| 12 | 0.0003808 | 0.0095517 | 0.467 | 0.797 | 221748_s_at | Info | tensin 1 /// tensin 1 | TNS1 |
| 13 | 0.000467 | 0.0108128 | 0.465 | 0.809 | 212226_s_at | Info | phosphatidic acid | PPAP2B |
| | | | | | | | phosphatase type 2B | |
| 14 | 0.0007256 | 0.0156004 | 0.417 | 0.641 | 200810_s_at | Info | cold inducible RNA | CIRBP |
| | | | | | | | binding protein | |
| 15 | 0.00098 | 0.0186996 | 0.408 | 0.649 | 205251_at | Info | period homolog 2 | PER2 |
| | | | | | | | (Drosophila) | |
| 16 | 0.000994 | 0.0186996 | 0.496 | 0.944 | 209047_at | Info | aquaporin 1 (channel- | AQP1 |
| | | | | | | | forming integral | |
| | | | | | | | protein, 28 kDa) | |

TABLE 14

| | Parametric | | Hazard | SD of log | | | | Gene |
|---|---|---|---|---|---|---|---|---|
| | p-value | FDR | Ratio | intensities | Probe set | Annotations | Description | symbol |
| 1 | 1.61e−05 | 0.0047012 | 2.421 | 0.681 | 204900_x_at | Info | sin3-associated | SAP30 |
| | | | | | | | polypeptide, 30 kDa | |
| 2 | 0.0002015 | 0.0262341 | 0.321 | 0.446 | 203758_at | Info | cathepsin O | CTSO |
| 3 | 0.0002713 | 0.0262341 | 0.324 | 0.474 | 203261_at | Info | dynactin 6 | DCTN6 |
| 4 | 0.0004705 | 0.0262341 | 3.538 | 0.338 | 204899_s_at | Info | sin3-associated | SAP30 |
| | | | | | | | polypeptide, 30 kDa | |
| 5 | 0.0005355 | 0.0262341 | 0.484 | 0.714 | 204451_at | Info | frizzled homolog 1 | FZD1 |
| | | | | | | | (Drosophila) | |
| 6 | 0.0005618 | 0.0262341 | 1.644 | 0.841 | 202856_s_at | Info | solute carrier family 16 | SLC16A3 |
| | | | | | | | (monocarboxylic acid | |
| | | | | | | | transporters), member 3 | |
| 7 | 0.0006289 | 0.0262341 | 0.365 | 0.518 | 221747_at | Info | Tensin 1 /// Tensin 1 | TNS |
| 8 | 0.0007515 | 0.0274297 | 2.681 | 0.392 | 219573_at | Info | leucine rich repeat | LRRC16 |
| | | | | | | | containing 16 | |

TABLE 15

| | | % CV | | | | Gene |
|---|---|---|---|---|---|---|
| | p-value | Support | Probe set | Description | Annotations | symbol |
| 1 | 0.000494 | 97.99 | 201584_s_at | DEAD (Asp-Glu-Ala-Asp) box | Info | DDX39 |
| | | | | polypeptide 39 | | |
| 2 | 0.000701 | 94.38 | 204900_x_at | sin3-associated polypeptide, 30 kDa | Info | SAP30 |
| 3 | 0.000957 | 49.4 | 202856_s_at | solute carrier family 16 (monocarboxylic | Info | SLC16A3 |
| | | | | acid transporters), member 3 | | |

[0123] Kaplan-Meier survival analysis is performed to investigate whether there is a survival difference between groups. A significant survival difference is observed implying that the level of activation of Anakin or Anakin-associated pathways within a tumor, presumably because of either somatic mutation or germline polymorphism, is an important determinant of the overall likelihood of relapse and/or survival (FIG. 3A). Further analysis indicates that survival is associated primarily because of the effects of thirty-three genes (which genes form Group 6 as indicated in Table 1). The degree of survival difference represented by the 33-gene Anakin-induced gene expression signature is similar to the original 70-gene signature described by van't Veer and colleagues (van't Veer et al., 2002, supra) (FIG. 3B).

[0124] Patient samples are stratified by estrogen receptor (ER) and lymph node (LN) status, two clinically relevant prognostic markers, to determine whether the Anakin signature might provide additional clinical stratification. Expression of the Anakin signature in bulk primary tumor tissue predicts outcome in both LN negative and LN positive patients and patients with ER positive tumors (FIGS. 3C, 3D & 3E, respectively). ER negative patients do not show a significant survival benefit (FIG. 3F). However, this may be due to the limited sample size and needs to be clarified with additional studies.

[0125] This example demonstrated the generation of a human Anakin gene expression signature and further suggests its relevance as a diagnostic and prognostic tool.

[0126] All references, including publications, patent applications, and patents, cited herein are hereby incorporated by reference to the same extent as if each reference were individually and specifically indicated to be incorporated by reference and were set forth in its entirety herein.

[0127] The use of the terms “a” and “an” and “the” and similar referents in the context of describing the invention (especially in the context of the following claims) are to be construed to cover both the singular and the plural, unless otherwise indicated herein or clearly contradicted by context. The terms “comprising,” “having,” “including,” and “containing” are to be construed as open-ended terms (i.e., meaning “including, but not limited to,”) unless otherwise noted. Recitation of ranges of values herein are merely intended to serve as a shorthand method of referring individually to each separate value falling within the range, unless otherwise indicated herein, and each separate value is incorporated into the specification as if it were individually recited herein. All methods described herein can be performed in any suitable order unless otherwise indicated herein or otherwise clearly contradicted by context. The use of any and all examples, or exemplary language (e.g., “such as”) provided herein, is intended merely to better illuminate the invention and does not pose a limitation on the scope of the invention unless otherwise claimed. No language in the specification should be construed as indicating any non-claimed element as essential to the practice of the invention.

[0128] Preferred embodiments of this invention are described herein, including the best mode known to the inventors for carrying out the invention. Variations of those preferred embodiments may become apparent to those of ordinary skill in the art upon reading the foregoing description. The inventors expect skilled artisans to employ such variations as appropriate, and the inventors intend for the invention to be practiced otherwise than as specifically described herein. Accordingly, this invention includes all modifications and equivalents of the subject matter recited in the claims appended hereto as permitted by applicable law. Moreover, any combination of the above-described elements in all possible variations thereof is encompassed by the invention unless otherwise indicated herein or otherwise clearly contradicted by context.

The application's sequence listing, which the Patent Office published only in electronic form, follows.

SEQUENCE LISTING (298 sequences)

SEQ ID NO: 1 - DNA, 5087 bp, Homo sapiens
cgccgccttctgtgcagtcgcggcccgggcggacggtggctggctgctccgcagcgctcggctggctgcagcggcaccgcgggttgcgcggccggggatgctccagcgggcgcgatggcccccgccatgcagccggccgagatccaatttgcccagcggctggcgtccagcgagaagggcatccgggaccgagcggtgaagaagctgcgccagtacatcagcgtgaagacgcagagggagacaggaggtttcagtcaggaagaacttctgaaaatctggaaggggctcttctactgcatgtgggtgcaggatgaaccccttctacaggaagagctcgccaacaccattgcacagctagtccatgctgttaacaactcagcggctcaacacctgttcattcagaccttttggcaaaccatgaatcgagaatggaaaggaatagacaggctacgcctggacaaatactatatgctgattcgtctggtcctgaggcagtcctttgaagtcttgaagcgaaatggctgggaagaaagccgaatcaaggttttcttggatgtcctgatgaaggaggtcctgtgtcctgagagtcagtctcctaatggagtgagattccacttcattgatatttacctggatgaactctccaaagtcggggggaaggagcttttagcagatcagaatctcaagtttatcgatccattctgcaaaattgctgcgaagacgaaggaccacaccctggtacagaccatagctcggggtgtcttcgaagctatcgtagatcagtctccttttgtgcctgaagagacgatggaggaacagaagacaaaagtgggtgatggtgacctctctgctgaggagatacctgaaaatgaggtatccttgagaagagctgtcagtaaaaagaagacagcactgggcaaaaaccattccagaaaagatggactcagtgatgaaagaggaagagatgactgtggaacctttgaggacacagggccccttctccagtttgactataaggctgttgctgatcgactcctggaaatgaccagcaggaagaacacgccccacttcaacaggaagcgcctctccaaactcatcaagaaattccaagacctttctgaaggaagcagtatatctcaactcagttttgcggaggacatttctgctgatgaagatgaccaaatcctcagtcaaggaaagcataagaagaaaggaaataaacttttagagaaaactaacttggaaaaggagaaaggaagcagagtcttttgtgtagaggaagaggacagtgaaagcagtcttcaaaagagaagaaggaagaagaagaagaagcaccacctgcagcctgaaaatccaggcccagggggtgcagccccatccctggaacagaaccggggcagggagcccgaggcctctgggctgaaagccctgaaggcacgtgtggccgagccaggtgcagaggccacgtccagcactggggaggagagtggctccgagcatcctccagccgtccccatgcacaataaaaggaaacggccacggaagaagagcccgagggcccacagggaaatgttggaatcagcagtgttgcccccagaggacatgtctcagagtggcccgagtggcagtcatcctcagggacctagagggtccccgacaggtggagcccaactcctaaaaaggaagcggaaacttggagttgtgcccgtcaatggcagtggcctgtccacgccggcctggcctccattgcagcaggaaggccctcccacaggccccgcagagggggcgaacagccacaccacgctgccccagcgcaggaggctgcagaaaaagaaggcagggcccggcagcctggagctctgtggcctgcccagccagaaaacagcaagtttgaaaaagaggaagaaaatgagagtgatgtcaaacttggtggagcacaacggggtgctggagtccgaagctgggcaaccccaggctctgggaagcagtgggacttgcagttccctgaagaagcagaagctgagggcagagagcgactttgtgaagtttgacacccccttcttaccaaagcccctgttcttcagaagagccaagagcagcactgccacccaccctccaggccctgccgtccagctaaacaagacaccatccagctccaagaaagtcacctttgggctgaacagaaacatgactgccgaattcaagaagacagacaagagtatcttggtcagtcccacgggcccttctcgagtggccttcgaccctgaacagaagcccctccacggggtgctgaagacccccaccagctcacctgccagctcacccctggtggccaagaagcccctgaccaccacaccaaggagaaggcccagggctatggatttcttctgaggagcagcagagtcccttgtaaaagactgcttttgtacagaatgcgctataaattatacctttaagaatgtggggccttttttatgattttgtaagttcccataagttgtgtgcacgaggttctgagagtgcccgcaggctgctgcgtcctggcccctctgtagtggctgcgggcgtcttggttgaatcttttgctacaaaccatgtttgcgtttgagctctccaggattttacatttttgggtaacctcagtgattcccattggtgtaggaaatgagaccctctctgaagctgaggagagcacgttgatctgaactttaaatcaatcagtgctgctggcacaatgaaaggtggaactgcacttctgttgagctctcagttctgcggaatttggtactcattaccgtattcgccgtactaagttggtttctgttagtcttaacagtctgttttcttttaaaagcatgtagggcttcattgccatgttctgtgggtgtttggcaggttaccgatggggaagattcttgtcacagaatcagcaataccatagtttttctacatgtgctcagctgggggtgtggacaggtaggggtggggaaagaagaggctctgcgttctgggggctttttcttctcctccccctacccggtttccctccctgttttcctacctctacggcaagcccaaagtgtcttcccgggagcccagcgcagcccccggctcttacccaggaccccgccccgtgctgagccttctgctgaggtccttgcgtggagcacactcattcctccaagcccttgcgctcccgtttctctctctctccgtccacgttccagccgagtcactgcctgaccggctccatggcagctccccatcttccctagaggctgcctgcgcatctggagcctgcgctccggctcagcgacctttcctctcaaatgcggaagcgtgcacttacagttcagaccgttctcctgtaagttcattacaaacacgggcggaaggcactcaggctttcgttggagaaacagaaataaggccttcttttgagcagcgattgctggatcattgatctgtttgaggaagtgtctgacctgggcctgagagctggagaaggtgcagattcaaagtgagcggctcctgaggagagccgccaaggctgctcgccttctccgtggcttccgcagctaccgtctgcacggtgagagggcacgggcacacggttcgggctggcgtgcagctctcccagccagccacgctctgctcaggcctggaagtgaaagccgcctccttcccgttatgccccccatacaggagcctcggtttttcagcaaaacgcggccagtccccttctccactgctgcctcccagcagagggccccaggatctccaaggtcccagctatggctttggacaacgtggcttcggcccctggggttgcagagcttgcattgggtttacctcggtctcattcattcatggagccaagggtggggtttcacctgcgaacatcagactgacttgctggcgtcaagagcagttgactcactgatgaaggccctggtgaggagaaagcactctgttcttcgcctactctgtaatcgttttgtcataatgagccatgaaaaaagtaatgaacttgtgctgttaatcgtcactgtaatgagaagtcttacgtacaacatagctgtggtggcttaatggctgcattagataggatcctcacatcccattcagaaccaaaactgatacagtgaaacaattaaggtgagcaaatagttttaacttttcttttttttttttaagtttcattcttcctagaatatttttctaacaatttttatttcagctttaaagatgggtcatatagccaaacgggccatataatccaacattgttgagatgtcttaggacatctaaggcaaaactggcacatttgttctgcagactattgcaggaatgttttttcctagcatttctatattatctgtccattctgaggaaccagtgaatgtcctataaatgcacctcctgtcaaaaccatgcctgagaggtcccggctgggagtgacagggtgcttcttagattctattggtccttctctcattctccgaacttactcctttttatgggtaagtcaactaggtttacagtcccttatttttaatgcctaagttttgacagcaggaagaaaacaattttttaaaaattctcattacatagacgcacaagaatatgtcacataaagaaaatgtgtttagaatactggttttctatttacgcatgatattttcctaagtaaaattgccaagtggacttggaagtccagaaaggaaaataatttaaattaatgctggtgatcttaacaatattttgtaaaatgatgcttcccccttctccatggtctagtcaattttgtacaattaggtatctgactttacaagtttgttatcctttctaatttttactgaactgaaagcacaaagaagactacacagaaaatctggaaacagttgcaggtgttgggaggaagatgaaatcgagctgtcttttaacttttgtatgtgttttatcagaatttgctggactatgctggcaaggactttgtttacgatcaaattgtactagtgtctgcagggtttgtcagtactcgtcaaagccaagtccaattaaaaaaaaaagtctttgccctccaa

SEQ ID NO: 2 - protein, 758 aa, Homo sapiens
MAPAMQPAEIQFAQRLASSEKGIRDRAVKKLRQYISVKTQRETGGFSQEELLKIWKGLFYCMWVQDEPLLQEELANTIAQLVHAVNNSAAQHLFIQTFWQTMNREWKGIDRLRLDKYYMLIRLVLRQSFEVLKRNGWEESRIKVFLDVLMKEVLCPESQSPNGVRFHFIDIYLDELSKVGGKELLADQNLKFIDPFCKIAAKTKDHTLVQTIARGVFEAIVDQSPFVPEETMEEQKTKVGDGDLSAEEIPENEVSLRRAVSKKKTALGKNHSRKDGLSDERGRDDCGTFEDTGPLLQFDYKAVADRLLEMTSRKNTPHFNRKRLSKLIKKFQDLSEGSSISQLSFAEDISADEDDQILSQGKHKKKGNKLLEKTNLEKEKGSRVFCVEEEDSESSLQKRRRKKKKKHHLQPENPGPGGAAPSLEQNRGREPEASGLKALKARVAEPGAEATSSTGEESGSEHPPAVPMHNKRKRPRKKSPRAHREMLESAVLPPEDMSQSGPSGSHPQGPRGSPTGGAQLLKRKRKLGVVPVNGSGLSTPAWPPLQQEGPPTGPAEGANSHTTLPQRRRLQKKKAGPGSLELCGLPSQKTASLKKRKKMRVMSNLVEHNGVLESEAGQPQALGSSGTCSSLKKQKLRAESDFVKFDTPFLPKPLFFRRAKSSTATHPPGPAVQLNKTPSSSKKVTFGLNRNMTAEFKKTDKSILVSPTGPSRVAFDPEQKPLHGVLKTPTSSPASSPLVAKKPLTTTPRRRPRAMDFF

SEQ ID NO: 3 - DNA, 5198 bp, Homo sapiens
attctttggaatactactgctagaagtctgacttaagacccagcttatgggccacatggcacccagctgcttctgcagagaaggcaggccactgatgggtacagcaaagtgtggtgctgctggccaagccaaagacccgtgtaggatgactgggcctctgccccttgtgggtgttgccactgtgcttgagtgcctggtgaagaatgtgatgggatcactagcatgtctgcggagagcggccctgggacgagattgagaaatctgccagtaatgggggatggactagaaacttcccaaatgtctacaacacaggcccaggcccaaccccagccagccaacgcagccagcaccaaccccccgcccccagagacctccaaccctaacaagcccaagaggcagaccaaccaactgcaatacctgctcagagtggtgctcaagacactatggaaacaccagtttgcatggcctttccagcagcctgtggatgccgtcaagctgaacctccctgattactataagatcattaaaacgcctatggatatgggaacaataaagaagcgcttggaaaacaactattactggaatgctcaggaatgtatccaggacttcaacactatgtttacaaattgttacatctacaacaagcctggagatgacatagtcttaatggcagaagctctggaaaagctcttcttgcaaaaaataaatgagctacccacagaagaaaccgagatcatgatagtccaggcaaaaggaagaggacgtgggaggaaagaaacagggacagcaaaacctggcgtttccacggtaccaaacacaactcaagcatcgactcctccgcagacccagacccctcagccgaatcctcctcctgtgcaggccacgcctcaccccttccctgccgtcaccccggacctcatcgtccagacccctgtcatgacagtggtgcctccccagccactgcagacgcccccgccagtgcccccccagccacaacccccacccgctccagctccccagcccgtacagagccacccacccatcatcgcggccaccccacagcctgtgaagacaaagaagggagtgaagaggaaagcagacaccaccacccccaccaccattgaccccattcacgagccaccctcgctgcccccggagcccaagaccaccaagctgggccagcggcgggagagcagccggcctgtgaaacctccaaagaaggacgtgcccgactctcagcagcacccagcaccagagaagagcagcaaggtctcggagcagctcaagtgctgcagcggcatcctcaaggagatgtttgccaagaagcacgccgcctacgcctggcccttctacaagcctgtggacgtggaggcactgggcctacacgactactgtgacatcatcaagcaccccatggacatgagcacaatcaagtctaaactggaggcccgtgagtaccgtgatgctcaggagtttggtgctgacgtccgattgatgttctccaactgctataagtacaaccctcctgaccatgaggtggtggccatggcccgcaagctccaggatgtgttcgaaatgcgctttgccaagatgccggacgagcctgaggagccagtggtggccgtgtcctccccggcagtgccccctcccaccaaggttgtggccccgccctcatccagcgacagcagcagcgatagctcctcggacagtgacagttcgactgatgactctgaggaggagcgagcccagcggctggctgagctccaggagcagctcaaagccgtgcacgagcagcttgcagccctctctcagccccagcagaacaaaccaaagaaaaaggagaaagacaagaaggaaaagaaaaaagaaaagcacaaaagaaaagaggaagtggaagagaataaaaaaagcaaagccaaggaacctcctcctaaaaagacgaagaaaaataatagcagcaacagcaatgtgagcaagaaggagccagcgcccatgaagagcaagccccctcccacgtatgagtcggaggaagaggacaagtgcaagcctatgtcctatgaggagaagcggcagctcagcttggacatcaacaagctccccggcgagaagctgggccgcgtggtgcacatcatccagtcacgggagccctccctgaagaattccaaccccgacgagattgaaatcgactttgagaccctgaagccgtccacactgcgtgagctggagcgctatgtcacctcctgtttgcggaagaaaaggaaacctcaagctgagaaagttgatgtgattgccggctcctccaagatgaagggcttctcgtcctcagagtcggagagctccagtgagtccagctcctctgacagcgaagactccgaaacagagatggctccgaagtcaaaaaagaaggggcaccccgggagggagcagaagaagcaccatcatcaccaccatcagcagatgcagcaggccccggctcctgtgccccagcagccgcccccgcctccccagcagcccccaccgcctccacctccgcagcagcaacagcagccgccacccccgcctcccccaccctccatgccgcagcaggcagccccggcgatgaagtcctcgcccccacccttcattgccacccaggtgcccgtcctggagccccagctcccaggcagcgtctttgaccccatcggccacttcacccagcccatcctgcacctgccgcagcctgagctgccccctcacctgccccagccgcctgagcacagcactccaccccatctcaaccagcacgcagtggtctctcctccagctttgcacaacgcactaccccagcagccatcacggcccagcaaccgagccgctgccctgcctcccaagcccgcccggcccccagccgtgtcaccagccttgacccaaacacccctgctcccacagccccccatggcccaacccccccaagtgctgctggaggatgaagagccacctgccccacccctcacctccatgcagatgcagctgtacctgcagcagctgcagaaggtgcagccccctacgccgctactcccttccgtgaaggtgcagtcccagcccccaccccccctgccgcccccaccccacccctctgtgcagcagcagctgcagcagcagccgccaccacccccaccaccccagccccagcctccaccccagcagcagcatcagccccctccacggcccgtgcacttgcagcccatgcagttttccacccacatccaacagcccccgccaccccagggccagcagcccccccatccgcccccaggccagcagccacccccgccgcagcctgccaagcctcagcaagtcatccagcaccaccattcaccccggcaccacaagtcggacccctactcaaccggtcacctccgcgaagccccctccccgcttatgatacattccccccagatgtcacagttccagagcctgacccaccagtctccaccccagcaaaacgtccagcctaagaaacaggagctgcgtgctgcctccgtggtccagccccagcccctcgtggtggtgaaggaggagaagatccactcacccatcatccgcagcgagcccttcagcccctcgctgcggccggagccccccaagcacccggagagcatcaaggcccccgtccacctgccccagcggccggaaatgaagcctgtggatgtcgggaggcctgtgatccggcccccagagcagaacgcaccgccaccaggggcccctgacaaggacaaacagaaacaggagccgaagactccagttgcgcccaaaaaggacctgaaaatcaagaacatgggctcctgggccagcctagtgcagaagcatccgaccaccccctcctccacagccaagtcatccagcgacagcttcgagcagttccgccgcgccgctcgggagaaagaggagcgtgagaaggccctgaaggctcaggccgagcacgctgagaaggagaaggagcggctgcggcaggagcgcatgaggagccgagaggacgaggatgcgctggagcaggcccggcgggcccatgaggaggcacgtcggcgccaggagcagcagcagcagcagcgccaggagcaacagcagcagcagcaacagcaagcagctgcggtggctgccgccgccaccccacaggcccagagctcccagccccagtccatgctggaccagcagagggagttggcccggaagcgggagcaggagcgaagacgccgggaagccatggcagctaccattgacatgaatttccagagtgatctattgtcaatatttgaagaaaatcttttctgagcgcacctaggtggcttctgactttgattttctggcaaaacattgactttccatagtgttaggggcggtggtggaggtgggatcagcggccaggggatgcctcagggcctggccctcctgcatgctatgcccggggcaggcctgacgggcagctgaggattgcagagcctgtctgccttacggccagtcggacagacgtcccgccacccaccacccctcacaggacgtccgctcagcacacgccttgttacgagcaagtgccggctggacccaagccctgcatccccacatgcggggcagaggcccttctctccgccaaatgtctacacagtatacacaggacatcgttgctgccgccgtgactggttttctgtccccaagaacgtgacgttcgtgatgtcctgcccgccgggagtctttccccacaccccagccatcgccgcccgctcccaggaggccagggcaggcctgcgtgggctggaggcgggcgaggccggcccaccccctcgctggcactgactttgccttgaacagaccccccgaccctcccccacaagcctttaattgagagccgctctctgtaagtgtttgcttgtgcaaaagggaatagtgccgtggaggtgtgtgtgtccatggcatccggagcgaggcgactgtcctgcgtgggtagccctcggccggggagtgaggccaccaaccaaagtcagttccttcccacctgtgtttctgtttcgtttttttttttcttttttttctatatatattttttgttgaattctattttatttttaattctctcttctcctccagacacaatggcactgcttatctccgaaatggtgtgatcgtctcctcattgagcagcggctgccaccgcgctgtgggta

SEQ ID NO: 4 - DNA, 3149 bp, Homo sapiens
attctttggaatactactgctagaagtctgacttaagacccagcttatgggccacatggcacccagctgcttctgcagagaaggcaggccactgatgggtacagcaaagtgtggtgctgctggccaagccaaagacccgtgtaggatgactgggcctctgccccttgtgggtgttgccactgtgcttgagtgcctggtgaagaatgtgatgggatcactagcatgtctgcggagagcggccctgggacgagattgagaaatctgccagtaatgggggatggactagaaacttcccaaatgtctacaacacaggcccaggcccaaccccagccagccaacgcagccagcaccaaccccccgcccccagagacctccaaccctaacaagcccaagaggcagaccaaccaactgcaatacctgctcagagtggtgctcaagacactatggaaacaccagtttgcatggcctttccagcagcctgtggatgccgtcaagctgaacctccctgattactataagatcattaaaacgcctatggatatgggaacaataaagaagcgcttggaaaacaactattactggaatgctcaggaatgtatccaggacttcaacactatgtttacaaattgttacatctacaacaagcctggagatgacatagtcttaatggcagaagctctggaaaagctcttcttgcaaaaaataaatgagctacccacagaagaaaccgagatcatgatagtccaggcaaaaggaagaggacgtgggaggaaagaaacagggacagcaaaacctggcgtttccacggtaccaaacacaactcaagcatcgactcctccgcagacccagacccctcagccgaatcctcctcctgtgcaggccacgcctcaccccttccctgccgtcaccccggacctcatcgtccagacccctgtcatgacagtggtgcctccccagccactgcagacgcccccgccagtgcccccccagccacaacccccacccgctccagctccccagcccgtacagagccacccacccatcatcgcggccaccccacagcctgtgaagacaaagaagggagtgaagaggaaagcagacaccaccacccccaccaccattgaccccattcacgagccaccctcgctgcccccggagcccaagaccaccaagctgggccagcggcgggagagcagccggcctgtgaaacctccaaagaaggacgtgcccgactctcagcagcacccagcaccagagaagagcagcaaggtctcggagcagctcaagtgctgcagcggcatcctcaaggagatgtttgccaagaagcacgccgcctacgcctggcccttctacaagcctgtggacgtggaggcactgggcctacacgactactgtgacatcatcaagcaccccatggacatgagcacaatcaagtctaaactggaggcccgtgagtaccgtgatgctcaggagtttggtgctgacgtccgattgatgttctccaactgctataagtacaaccctcctgaccatgaggtggtggccatggcccgcaagctccaggatgtgttcgaaatgcgctttgccaagatgccggacgagcctgaggagccagtggtggccgtgtcctccccggcagtgccccctcccaccaaggttgtggccccgccctcatccagcgacagcagcagcgatagctcctcggacagtgacagttcgactgatgactctgaggaggagcgagcccagcggctggctgagctccaggagcagctcaaagccgtgcacgagcagcttgcagccctctctcagccccagcagaacaaaccaaagaaaaaggagaaagacaagaaggaaaagaaaaaagaaaagcacaaaagaaaagaggaagtggaagagaataaaaaaagcaaagccaaggaacctcctcctaaaaagacgaagaaaaataatagcagcaacagcaatgtgagcaagaaggagccagcgcccatgaagagcaagccccctcccacgtatgagtcggaggaagaggacaagtgcaagcctatgtcctatgaggagaagcggcagctcagcttggacatcaacaagctccccggcgagaagctgggccgcgtggtgcacatcatccagtcacgggagccctccctgaagaattccaaccccgacgagattgaaatcgactttgagaccctgaagccgtccacactgcgtgagctggagcgctatgtcacctcctgtttgcggaagaaaaggaaacctcaagctgagaaagttgatgtgattgccggctcctccaagatgaagggcttctcgtcctcagagtcggagagctccagtgagtccagctcctctgacagcgaagactccgaaacaggtcctgcctaatcattggacacggactcttaataaaacggtcttcagttccagattccttcccagcaagctatagcttaagtccattttcttccgtgaaagggacaggactccatcaagttatggaattcctcagagccctgggcctgtcccccggggtggattagtcatgtccagcagcacacgcctagtcccgccttcgggaaggctgcctgcctggccagccgcccaggcctctctgtgtaaagactgcctggctgtcctgcccagccttcctggttctctggggtcctctgggtgggtggcatctcctggagggtgatgacaatccccaacacatgcattcatgtggtgctactctgtgtgcaaagccagaccccaagtatgttttctctctttgtcccatccctctttttctgggactttggaccctaactacttccctcctgaaccttgcagtgacatcagtccaggagagctctcgttcagtgtgcggaagaacactctgacctctagagctgtcctagataaggagtgggagctttagaggcaaggcctctagaccctggaaggctcagtgaggctcttcccacagcatgcttctcactggtgccctgtaagctcgagccaccgctgactctgagcctttttggagtctttcctccttcgtctccattgttccgtgcatttccaaagcttaagttgctggtgggcatttccccagtttctatgggctccgtcttctcaagtcacatagggaaagtaccttc

SEQ ID NO: 5 - protein, 1362 aa, Homo sapiens
MSAESGPGTRLRNLPVMGDGLETSQMSTTQAQAQPQPANAASTNPPPPETSNPNKPKRQTNQLQYLLRVVLKTLWKHQFAWPFQQPVDAVKLNLPDYYKIIKTPMDMGTIKKRLENNYYWNAQECIQDFNTMFTNCYIYNKPGDDIVLMAEALEKLFLQKINELPTEETEIMIVQAKGRGRGRKETGTAKPGVSTVPNTTQASTPPQTQTPQPNPPPVQATPHPFPAVTPDLIVQTPVMTVVPPQPLQTPPPVPPQPQPPPAPAPQPVQSHPPIIAATPQPVKTKKGVKRKADTTTPTTIDPIHEPPSLPPEPKTTKLGQRRESSRPVKPPKKDVPDSQQHPAPEKSSKVSEQLKCCSGILKEMFAKKHAAYAWPFYKPVDVEALGLHDYCDIIKHPMDMSTIKSKLEAREYRDAQEFGADVRLMFSNCYKYNPPDHEVVAMARKLQDVFEMRFAKMPDEPEEPVVAVSSPAVPPPTKVVAPPSSSDSSSDSSSDSDSSTDDSEEERAQRLAELQEQLKAVHEQLAALSQPQQNKPKKKEKDKKEKKKEKHKRKEEVEENKKSKAKEPPPKKTKKNNSSNSNVSKKEPAPMKSKPPPTYESEEEDKCKPMSYEEKRQLSLDINKLPGEKLGRVVHIIQSREPSLKNSNPDEIEIDFETLKPSTLRELERYVTSCLRKKRKPQAEKVDVIAGSSKMKGFSSSESESSSESSSSDSEDSETEMAPKSKKKGHPGREQKKHHHHHHQQMQQAPAPVPQQPPPPPQQPPPPPPPQQQQQPPPPPPPPSMPQQAAPAMKSSPPPFIATQVPVLEPQLPGSVFDPIGHFTQPILHLPQPELPPHLPQPPEHSTPPHLNQHAVVSPPALHNALPQQPSRPSNRAAALPPKPARPPAVSPALTQTPLLPQPPMAQPPQVLLEDEEPPAPPLTSMQMQLYLQQLQKVQPPTPLLPSVKVQSQPPPPLPPPPHPSVQQQLQQQPPPPPPPQPQPPPQQQHQPPPRPVHLQPMQFSTHIQQPPPPQGQQPPHPPPGQQPPPPQPAKPQQVIQHHHSPRHHKSDPYSTGHLREAPSPLMIHSPQMSQFQSLTHQSPPQQNVQPKKQELRAASVVQPQPLVVVKEEKIHSPIIRSEPFSPSLRPEPPKHPESIKAPVHLPQRPEMKPVDVGRPVIRPPEQNAPPPGAPDKDKQKQEPKTPVAPKKDLKIKNMGSWASLVQKHPTTPSSTAKSSSDSFEQFRRAAREKEEREKALKAQAEHAEKEKERLRQERMRSREDEDALEQARRAHEEARRRQEQQQQQRQEQQQQQQQQAAAVAAAATPQAQSSQPQSMLDQQRELARKREQERRRREAMAATIDMNFQSDLLSIFEENLF

SEQ ID NO: 6 - protein, 722 aa, Homo sapiens
MSAESGPGTRLRNLPVMGDGLETSQMSTTQAQAQPQPANAASTNPPPPETSNPNKPKRQTNQLQYLLRVVLKTLWKHQFAWPFQQPVDAVKLNLPDYYKIIKTPMDMGTIKKRLENNYYWNAQECIQDFNTMFTNCYIYNKPGDDIVLMAEALEKLFLQKINELPTEETEIMIVQAKGRGRGRKETGTAKPGVSTVPNTTQASTPPQTQTPQPNPPPVQATPHPFPAVTPDLIVQTPVMTVVPPQPLQTPPPVPPQPQPPPAPAPQPVQSHPPIIAATPQPVKTKKGVKRKADTTTPTTIDPIHEPPSLPPEPKTTKLGQRRESSRPVKPPKKDVPDSQQHPAPEKSSKVSEQLKCCSGILKEMFAKKHAAYAWPFYKPVDVEALGLHDYCDIIKHPMDMSTIKSKLEAREYRDAQEFGADVRLMFSNCYKYNPPDHEVVAMARKLQDVFEMRFAKMPDEPEEPVVAVSSPAVPPPTKVVAPPSSSDSSSDSSSDSDSSTDDSEEERAQRLAELQEQLKAVHEQLAALSQPQQNKPKKKEKDKKEKKKEKHKRKEEVEENKKSKAKEPPPKKTKKNNSSNSNVSKKEPAPMKSKPPPTYESEEEDKCKPMSYEEKRQLSLDINKLPGEKLGRVVHIIQSREPSLKNSNPDEIEIDFETLKPSTLRELERYVTSCLRKKRKPQAEKVDVIAGSSKMKGFSSSESESSSESSSSDSEDSETGPA

SEQ ID NO: 7 - DNA, 3344 bp, Homo sapiens
ggtacagctgcgcgtctgcgggaataggtgcagcgggcccttggcgggggactctgagggaggagctggggacggcgaccctaggagagttctttggggtgactttcaagatggactctactctaacagcaagtgaaatccggcagcgatttatagatttcttcaagaggaacgagcatacgtatgttcactcgtctgccaccatcccattggatgaccccactttgctctttgccaatgcaggcatgaaccagtttaaacccattttcctgaacacaattgacccatctcaccccatggcaaagctgagcagagctgccaatacccagaagtgcatccgggctgggggcaaacataatgacctggacgatgtgggcaaggatgtctatcatcacaccttcttcgagatgctgggctcttggtcttttggagattactttaaggaattggcatgtaagatggctctggaactcctcacccaagagtttggcattcccattgaaagactttatgttacttactttggcggggatgaagcagctggcttagaagcagatctggaatgcaaacagatctggcaaaatttggggctggatgacaccaaaatcctcccaggcaacatgaaggataacttctgggagatgggtgacacgggcccctgtggtccttgcagtgagatccactacgaccggattggtggtcgggacgccgcacatcttgtcaaccaggacgaccctaatgtgctggagatctggaaccttgtgttcatccagtataacagggaagctgatggcattctgaaacctcttcccaagaaaagcattgacacagggatgggcctggaacgactggtatctgtgctgcagaataagatgtccaactatgacactgacctttttgtcccttactttgaagccattcagaagggcacaggtgcccgaccatacactgggaaagttggtgctgaggatgccgatgggattgacatggcctaccgggtgctggctgaccacgctcggaccatcactgtggcactggctgatggtggccggcctgacaacacagggcgtggatatgtgttgagacggattctccgccgagctgtccgatacgcccatgaaaagctcaatgccagcaggggcttctttgctacgttagtggatgttgtcgtccagtccctgggagatgcatttcctgagctgaagaaggacccagacatggtgaaggacatcattaatgaagaagaggtgcagtttctcaagactctcagcagagggcgtcgcatcctggacaggaaaattcagagcctgggagacagcaagaccattcccggagacactgcttggctcctctatgacacctatgggtttccagtggatctgactggactgattgctgaagagaagggcctggtggtagacatggatggctttgaagaggagaggaaactggcccagctgaaatcacagggcaagggagctggtggggaagacctcattatgctggacatttacgctatcgaagagctccgggcacggggtctggaggtcacagatgattccccaaagtacaattaccatttggactccagtggtagctatgtatttgagaacacagtggctacggtgatggctctgcgcagggagaagatgttcgtggaagaggtgtccacaggccaggagtgtggagtggtgctggacaagacctgtttctatgctgagcaaggaggccagatctatgacgaaggctacctggtgaaggtggatgacagcagtgaagataaaacagagtttacagtgaagaatgctcaggtccgaggagggtatgtgctacacattggaaccatctacggtgacctgaaagtgggggatcaggtctggctgtttattgatgagccccgacgaagacccatcatgagcaaccacacagctacgcacattctgaacttcgccctgcgctcagtgcttggggaagctgaccagaaaggctcattggttgctcctgaccgcctcagatttgactttactgccaagggagccatgtccacccaacagatcaagaaggctgaagagattgctaatgagatgattgaggcagccaaggccgtctatacccaggattgccccctggcagcagcgaaagccatccagggcctacgggctgtgtttgatgagacctatcctgaccctgtgcgagtcgtctccattggggtcccggtgtccgagttgctggatgacccctctgggcctgctggctccctgacttctgttgagttctgtgggggaacgcacctgcggaactcgagtcatgcaggagcttttgtgatcgtgacggaagaagccattgccaagggtatccggaggattgtggctgtcacaggtgccgaggcccagaaggccctcaggaaagcagagagcttgaagaaatgtctctctgtcatggaagccaaagtgaaggctcagactgctccaaacaaggatgtgcagagggagatcgctgaccttggagaggccctggccactgcagtcatcccccagtggcagaaggatgaattgcgggagactctcaaatccctaaagaaggtcatggatgacttggaccgagccagcaaagccgatgtccagaaacgagtgttagagaagacgaagcagttcatcgacagcaaccccaaccagcctcttgtcatcctggagatggagagcggcgcctcagccaaggccctgaatgaagccttgaagctcttcaagatgcactcccctcagacttctgccatgctcttcacggtggacaatgaggctggcaagatcacgtgcctgtgtcaagttccccagaatgcagccaatcggggcttaaaagccagcgagtgggtgcagcaggtgtcaggcttgatggacggtaaaggtggtggcaaggatgtgtctgcacaggccacaggcaagaacgttggctgcctgcaggaggcgctgcagctggccacttccttcgcccagctgcgcctcggggatgtaaagaactgagtggggaaggaggaggctcccactggatccatccgtccagccaagagctcttcatctgctacaagaacatttgaatcttgggacctttaaagagcccctcctaacccagcagtaactggaacacacttgggagcagtcctatgtctcagtgccccttaaatttctgccctgagccctccacgtcagtgccatcggtctagaaccactaaccccgcattgctgttgatcgtcacgctcgcatctatagataacggctctccagacctgagctttccgcgtcagcaagtaggaatcgtttttgctgcagagaataaaaggaccacgtgc

SEQ ID NO: 8 - DNA, 2445 bp, Homo sapiens
acctcgttcatctccttcacctccgaaatgatctcgcttttgggtttacggccggtctcttcacctggagcatcagccgggaaggtcagggtcgccctggctcgggcctgttcacattggggtcaaaggcacacattgggggctcaaccaaggcgagctgcgttcgcggggccgggtctttccgcacaggcggagggcggtggcgggcgcggaggcgtcgcgcgagccagggggcagccacgggccgggggtacctagcgccacccgcttcgcttgcatcagctgcgcgccccatcccgaggaatggtagaggcagccccgcccccggcccgcccccgcctttccattggctgccgcgcggggcggggagcggggtcggctcagtggccctgagaccctagctctgctctcggtccgctcgctgtccgctagcccgctgcgatgttgcgcgctgccgcccgcttcgggccccgcctgggccgccgcctcttgtcagccgccgccacccaggccgtgcctgcccccaaccagcagcccgaggtcttctgcaaccagattttcataaacaatgaatggcacgatgccgtcagcaggaaaacattccccaccgtcaatccgtccactggagaggtcatctgtcaggtagctgaaggggacaaggaagatgtggacaaggcagtgaaggccgcccgggccgccttccagctgggctcaccttggcgccgcatggacgcatcacacaggggccggctgctgaaccgcctggccgatctgatcgagcgggaccggacctacctggcggccttggagaccctggacaatggcaagccctatgtcatctcctacctggtggatttggacatggtcctcaaatgtctccggtattatgccggctgggctgataagtaccacgggaaaaccatccccattgacggagacttcttcagctacacacgccatgaacctgtgggggtgtgcgggcagatcattccgtggaatttcccgctcctgatgcaagcatggaagctgggcccagccttggcaactggaaacgtggttgtgatgaaggtagctgagcagacacccctcaccgccctctatgtggccaacctgatcaaggaggctggctttccccctggtgtggtcaacattgtgcctggatttggccccacggctggggccgccattgcctcccatgaggatgtggacaaagtggcattcacaggctccactgagattggccgcgtaatccaggttgctgctgggagcagcaacctcaagagagtgaccttggagctgggggggaagagccccaacatcatcatgtcagatgccgatatggattgggccgtggaacaggcccacttcgccctgttcttcaaccagggccagtgctgctgtgccggctcccggaccttcgtgcaggaggacatctatgatgagtttgtggagcggagcgttgcccgggccaagtctcgggtggtcgggaacccctttgatagcaagaccgagcaggggccgcaggtggatgaaactcagtttaagaagatcctcggctacatcaacacggggaagcaagagggggcgaagctgctgtgtggtgggggcattgctgctgaccgtggttacttcatccagcccactgtgtttggagatgtgcaggatggcatgaccatcgccaaggaggagatcttcgggccagtgatgcagatcctgaagttcaagaccatagaggaggttgttgggagagccaacaattccacgtacgggctggccgcagctgtcttcacaaaggatttggacaaggccaattacctgtcccaggccctccaggcgggcactgtgtgggtcaactgctatgatgtgtttggagcccagtcaccctttggtggctacaagatgtcggggagtggccgggagttgggcgagtacgggctgcaggcatacactgaagtgaaaactgtcacagtcaaagtgcctcagaagaactcataagaatcatgcaagcttcctccctcagccattgatggaaagttcagcaagatcagcaacaaaaccaagaaaaatgatccttgcgtgctgaatatctgaaaagagaaatttttcctacaaaatctcttgggtcaagaaagttctagaatttgaattgataaacatggtgggttggctgagggtaagagtatatgaggaaccttttaaacgacaacaatactgctagctttcaggatgatttttaaaaaatagattcaaatgtgttatcctctctctgaaacgcttcctataactcgagtttataggggaagaaaaagctattgtttacaattatatcaccattaaggcaactgctacaccctgctttgtattctgggctaagattcattaaaaactagctgctcttaaaaaaaaaaaaaaaaaaaaaaaaaaaaaaaaaaaaaaaaaaaaaaa

SEQ ID NO: 9 - DNA, 1665 bp, Homo sapiens
ccggaggagtcacgtagctctgcgacatccgcagcctcatttaccagagggagccagggctgcagcctcatctgtttgcggatcagaacccgagctgtgcttgtggctgcggctgctaactggctgcgcacagggagctgtcaccatgcctcactcgtacccagccctttctgctgagcagaagaaggagttgtctgacattgccctgcggattgtagccccgggcaaaggcattctggctgcggatgagtctgtaggcagcatggccaagcggctgagccaaattggggtggaaaacacagaggagaaccgccggctgtaccgccaggtcctgttcagtgctgatgaccgtgtgaaaaagtgcattggaggcgtcattttcttccatgagaccctctaccagaaagatgataatggtgttcccttcgtccgaaccatccaggataagggcatcgtcgtgggcatcaaggttgacaagggtgtggtgcctctagctgggactgatggagaaaccaccactcaagggctggatgggctctcagaacgctgtgcccaatacaagaaggatggtgctgactttgccaagtggcgctgtgtgctgaaaatcagtgagcgtacaccctctgcacttgccattctggagaacgccaacgtgctggcccgttatgccagtatctgccagcagaatggcattgtgcctattgtggaacctgaaatattgcctgatggagaccacgacctcaaacgttgtcagtatgttacagagaaggtcttggctgctgtgtacaaggccctgagtgaccatcatgtatacctggaggggaccctgctcaagcccaacatggtgaccccgggccatgcctgtcccatcaagtataccccagaggagattgccatggcaactgtcactgccctgcgtcgcactgtgcccccagctgtcccaggagtgaccttcctgtctgggggtcagagcgaagaagaggcatcattcaacctcaatgccatcaaccgctgcccccttccccgaccctgggcgcttaccttctcctatgggcgtgccctgcaagcctctgcactcaatgcctggcgagggcaacgggacaatgctggggctgccactgaggagttcatcaagcgggctgaggtgaatgggcttgcagcccagggcaagtatgaaggcagtggagaagatggtggagcagcagcacagtcactctacattgccaaccatgcctactgagtatccactccataccacagcccttggcccagccatctgcacccacttttgcttgtagtcatggccagggccaaatagctatgcagagcagagatgccttcacctggcaccaacttgtcttcctttctctcttcccttcccctctctcattgctgcacctgggaccataggatgggaggatagggagcccctcatgactgagggcagaagaaattgctagaagtcagaacaggatggctgggtctccccctacctcttccagctcccacaattttcccatgatgaggtagcttctccctgggctctccttcttgcctgccctgtctcctgggatcagagggtagtacagaagccctgactcatgccttgagtacataccatacagcaaataaatggtagcaaaacattctaaaaaaaaaaaaaaa

SEQ ID NO: 10 - DNA, 2764 bp, Homo sapiens
agctctcagagggaattgagcacccggcagcggtctcaggccaagccccctgccagcatggccagcgagttcaagaagaagctcttctggagggcagtggtggccgagttcctggccacgaccctctttgtcttcatcagcatcggttctgccctgggcttcaaatacccggtggggaacaaccagacggcggtccaggacaacgtgaaggtgtcgctggccttcgggctgagcatcgccacgctggcgcagagtgtgggccacatcagcggcgcccacctcaacccggctgtcacactggggctgctgctcagctgccagatcagcatcttccgtgccctcatgtacatcatcgcccagtgcgtgggggccatcgtcgccaccgccatcctctcaggcatcacctcctccctgactgggaactcgcttggccgcaatgacctggctgatggtgtgaactcgggccagggcctgggcatcgagatcatcgggaccctccagctggtgctatgcgtgctggctactaccgaccggaggcgccgtgaccttggtggctcagccccccttgccatcggcctctctgtagcccttggacacctcctggctattgactacactggctgtgggattaaccctgctcggtcctttggctccgcggtgatcacacacaacttcagcaaccactggattttctgggtggggccattcatcgggggagccctggctgtactcatctacgacttcatcctggccccacgcagcagtgacctcacagaccgcgtgaaggtgtggaccagcggccaggtggaggagtatgacctggatgccgacgacatcaactccagggtggagatgaagcccaaatagaaggggtctggcccgggcatccacgtagggggcaggggcaggggcgggcggagggaggggaggggtgaaatccatactgtagacactctgacaagctggccaaagtcacttccccaagatctgccagacctgcatggtcaagcctcttatgggggtgtttctatctctttctttctctttctgtttcctggcctcagagcttcctggggaccaagatttaccaattcacccactcccttgaagttgtggaggaggtgaaagaaagggacccacctgctagtcgcccctcagagcatgatgggaggtgtgccagaaagtcccccctcgccccaaagttgctcaccgactcacctgcgcaagtgcctgggattctaccgtaattgctttgtgcctttgggcacggccctccttcttttcctaacatgcaccttgctcccaatggtgcttggagggggaagagatcccaggaggtgcagtggagggggcaagctttgctccttcagttctgcttgctcccaagcccctgacccgctcggacttactgcctgaccttggaatcgtccctatatcagggcctgagtgacctccttctgcaaagtggcagggaccggcagagctctacaggcctgcagcccctaagtgcaaacacagcatgggtccagaagacgtggtctagaccagggctgctctttccacttgccctgtgttctttccccaggggcatgactgtcgccacacgcctctgtgtacatgtgtgcagagcagacaggctacaaagcagagatcgacagacagccaggtagttggaactttctgttccctatggagaggcttccctacacagggcctgctattgcagaatgaagccatttagagggtgaaggagaaatacccatgttacttctctgagttttagttggtctttccatctatcactgcattatcttgctcattcttcagttctctactccctcttgtcagtgtagacacaggtcaccattatgctggtgtatgtttatcaaagagcacttgagctgtctgaagcccaaagcctgaggacagaaagaccctgatgcaggtcagcccatggaggcagatgcccttgctgggcctgggggttttccaagccctcagctggtcctgaccaggatggagcaagctcttcccttgctcatgagctcctgatcagaggcatttgagcagctgaataacctgcacaggcttgctgtatgacccctggccacagccttccctctgcattgacctggaggggagaggtcagccttgacctaatgaggtagctatagttgcagcccaaggacagttcagagatcaggatcagctttgaaggctggattctatctacataagtcctttcaattccaccagggccagagcagctccaccactgtgcacttagccatgatggcaacagaaaccaagagacacaattacgcaggtatttagaagcagagggacaaccagaaggcccttaactatcaccagtgcatcacatctgcacactctcttctccattccctagcaggaacttctagctcatttaacagataaagaaactgaggcccacggtttcagctagacaatgatttggccaggcctagtaaccaaggccctgtctctggctactccctggaccacgaggctgattcctctcatttccagcttctcagtttctgcctgggcaatggccaggggccaggagtggggagagttgtgatggaggggagaggggtcacacccaccccctgcctggttctaggctgctgcacaccaaggccctgcatctgtctgctctgcatatatgtctctttggagttggaatttcattatatgttaagaaaataaaggaaaatgacttgtaaggtcaaaaaaaaaa

SEQ ID NO: 11 - DNA, 5282 bp, Homo sapiens
ctcatttccaaggtcccctgaagtgctggctcacctctgtttcccaaagcacttgcttgcttgtctctcctccctccccagcatccttttcactttcttcccttataacttcttgcactctgtgtgcgtgtgtgtgtatgcgtgtgtgcatgtgcgtttcttctttttttttatcctaacgaatttgttttgcaggttttgaaaaggaaaaaccagcgttatccaggattgttaaattaattcttatctgtttccacatcttggaccgtgatctctgtggttttaaaatcccatattttgagtgggttccgctgttgtttaagaaaagttgctttaaacctttgctctgcaagcacccgaagagaactcataaaaaggaagacaacagcagatgcaatcgcggatgtggcttagtccttgcagctgccccagagtgctgtttggagtgtaccgtcctcagtaatgaatccagaagaacaaatcgtgacatggcttatatctttgggagttttagagtcccctaaaaagaccatctgtgatccggaggagtttttaaagtcctcgctgaaaaatggggtagttctgtgcaaactgatcaacagactcatgcctggctctgtggaaaagttttgtctggatccccaaactgaagctgactgcatcaacaacatcaatgacttcctgaaaggatgtgcaaccctccaagtggaaatatttgatcctgatgacctttattcaggggtcaatttctccaaggtactgagtactcttttagctgtcaacaaagcaacagaagatcagctatcagaaagaccatgtggacgttcctcttctcttagtgctgctaatacttctcagacaaacccacagggagcagtttctagcacagtttcagggctgcaaaggcagtcaaagacagtggagatgacggaaaatggaagtcatcagttgatagtaaaagcaagattcaactttaagcagactaatgaggatgaactgtcagtttgtaagggggacatcatttacgtcacacgagttgaagaaggaggctggtgggaaggcacattaaatgggagaacaggctggttccccagtaattatgtccgtgaaattaaatccagtgagagacctctctccccaaaagccgtcaaaggatttgaaactgctccacttaccaagaattattatactgtggtgttacagaacatcctggacactgaaaaagaatatgctaaagaacttcagtctcttcttgttacttacttaagacccctgcagtccaataacaatctgagtactgtggaggttacatctttactgggaaacttcgaggaagtatgcacatttcaacagacactctgccaagccttggaagaatgttcaaagtttccagaaaaccagcacaaagtaggaggttgtctactgagtctcatgcctcattttaaatctatgtatctggcttactgtgcaaaccatccttcagctgtaaatgtgctcactcagcacagtgatgagttggaacaattcatggaaaatcaaggtgcatcgagcccaggtatcctcattttaacaacaaacctcagcaaaccattcatgcgactggagaaatatgttactctcttgcaagagttagaacggcatatggaggatactcatccagatcatcaggatattctgaaagcaatcgtagcattcaaaactctcatggggcaatgtcaagatctgaggaagagaaaacagctggagttacagatactgtccgaacctattcaggcatgggaaggagaagatattaaaaacttgggaaatgtgatttttatgtcacaagtaatggtgcagtatggagcatgtgaggaaaaagaggagcggtaccttatgttattttcaaatgtcctgataatgttatctgcaagtcctcggatgagtggctttatctatcagggaaaaataccaatagcaggaacggtggtgactagattagatgaaattgaagggaatgactgcacatttgaaatcactggtaacacagtggagagaattgtggtccattgtaacaacaaccaggacttccaggaatggttggagcagctgaacagactgatcagaggacctgcctcttgcagttcattatccaaaacctcatcgtcatcatgtagtgctcattcttcttttagctctaccggacagccccgaggacccttggagcctcctcaaattataaaaccgtggagtttaagttgtctacgacctgcacctccacttagaccatcagcagcactaggttataaagagaggatgtcttatatcttaaaggagtctagtaaaagccctaaaacgatgaagaaatttcttcataaaaggaagactgagagaaaaccatcggaggaggaatatgtgattaggaaaagtacagctgctctggaagaggatgctcaaatccttaaagtgatcgaagcctactgcaccagcgcaaattttcaacaaggccatggctcaagtactcgaaaagattccattccacaagtcctactccctgaggaagagaaactcatcattgaagaaaccagaagcaacggccagaccatcatggaagaaaagagccttgttgatactgtttacgccttgaaggacgaggtcagagaactgaagcaggaaaataaaagaatgaagcaatgcctggaagaagaactgaaatcaagaagggacctagaaaagctggtgcggaggcttttgaagcaaacagatgagtgtattcgaggcgagtccagtagcaagacctcaattcttccataaccatcactgtgccactgggtggagtgtgccttcagggcatcttgaaatgtcccgctgaatgatttgactcagtttgctcacttctttggcttttgttttgtgtttgagtctctctctctctctccctctctcttctctttctctccccgctgtgtgcatatgtgtgtgcgtgcacgtgcgcgcttgggcatttgctgttgtttggttattggttggttgttcattttttttttcaacaggtgaaaaagcaggaagtggtggtagagatggcctcagagtcttttccattcagtaagaaagagaaagggaatgcaggccagttacttaaaaggtcttcagattgccttcagttcacagtgcctctgcaacagccattgccctcaggtcacattctttgggctggctgcccttgcaaagcagctggccaaggcttattaaatgtgaacccaacttttccccagggctttcctgtacctgcaagcctcttagtacttaatttaccgaaggcaaatcttccagactatggcttgagtaggatgaaagacaaacacatctgcccaatgatccagctgcccttccttagaccatcacatgcctcccctcaatcacaggttttaaaattactgccctatgttgtctataagaccaagaaaactgtagtacccttattccttttgtgtcatgtaaattgtaactcaggggggcagaagctctggtcacccacaccaacaccaaatccatcagcaaattctactggacaatcctcccttttagtagcagagttgaccgccttttcccattgcatgataggtttctttccctcattctgcctagtgtgtaagttttctatttccccagtacttttagccaaccttaccaagtggtgtgtaaactagtatgtatgtgctttgcttactttttaaaaaaatgtagttagactgtgaggagttactttatgtacgttgcatattcaaactgtgatgttttatccttcaaaacaatctgcattaagaagatattgtgccctactagacagctttcattcactttattactctctcatatatgctgtgagaagttgtaatattaattggcctctttgggtgggactctaagcagtatttgcagaaatatgcttctggtccaacttgtacatccagaacaaaagggcccctctagtagctgtgtgctggattattcaggactgattaactcaagttgctcattgaatcacatcatccactttatcccagaaactagaactgtgagaaaccaggtttagaagacagtcacagaacagcacacatccaaattcagcgccattgaaagttggcctaaggctcagtgccactcacccctccctccccaaaagacaagagaaatttggccagatggggaaggtcactggaaattgaggccaaagggctgatcagaattgcctttataatatatttgatggatgcctataaatgtgggttttgcaaatattgtttaaaaaccaaacttgaagccaggcatggtggcccacacctgtggtcccagctactcaggaggctgaggtgggaggatcatttgagcccaggaggtcaaggctgcagtgagctgtgatgacaccactgcactccaacctaggtaacagagagacacctctgtctctgaaaaaacaaaacttgaagtttgaaacccccagcttgctgaggagccctttttatttttggtactgagagtctcaaggtcccatagctacatggtacagggctgttgtctgcttgctgcacagcagaaattacaccatccacaggaaatggactatttttgcagtccaacatcagccaaccacacacagccgtgtttggaagctgaagagtaaagaaatttctaggaatggctgttgttctgttttttagcacagccatttagatataacatccttcacttaaaaattaaaaacatcagtactaccaccaccaccaacaacatcaacacagatcttcacatctgcccattctgtggttagtcaatggcttgcaataaatgtgcaaactgcatctataggaaacatttttgtgattacggaatactttagttgattgctgaaaatattgaaaggtcttcattttacagtgatgagtacatatgcatgtttcggggacttggcccttctgatgaggggccctcggtactctggataacgaagcttgtgcagagtggtaaccatgcttacacactaaactataatataaaggaaatgaagccatgttaatctgagagcagtgtcgccatagttgtgttgtttacaatactctataaatgggttcctgttgccctgtaattaaactgctgcccgtagaggcctttcagttccttttctgtccttccccttcttaacacaagctcaaattttctaacttgtttttattttgaagacttttaaaatggacattttcaatacataaaaataaacagtgctttataaaaaaaaaaaaaaa

SEQ ID NO: 12 - DNA, 3830 bp, Homo sapiens
tccacctcttgtccctcggcctccgcgcctcccctcccccgactctctggcctcccattcattccgtccgctccctcccatttcctcttttccgctcgggccctctccccagagcctccccgcgcggaccccgctgcagtgtcggggttctcagcacatttatggaagtttagggcctggacagtggccccgagtccggcctgagagcgcagcctgggctgctggcagggaagaggaagatgtctgtgctcaggcggatgatgcgggtttccaatcgctctctcctcgccttcatcttctttttctccctctcttcgtcctgtctgtacttcatctatgtggccccaggcatcgccaacacatatctctttatggtacaagctcgaggtataatgttgagagaaaatgtgaaaacaataggtcatatgatcaggctgtacacaaataaaaacagtacgctcaacggtacagattatcccgaaggcaataattcaagtgattatcttgttcaaacaacaacgtatctcccggaaaacttcacatactcaccatacctcccctgtccagaaaagctgccttatatgcgaggattcctcaatgtcaatgtaagcgaagtcagttttgatgaaattcatcaactcttctccaaggatttagatattgagccagggggtcattggaggccaaaagactgtaaacccagatggaaggtggcagttctcattcctttccgtaatcgccatgaacatcttccaatttttttcttacatctgattccaatgctccagaagcagcggctggaatttgcgttttatgtcgttgaacagactggcacacaaccttttaaccgtgcgatgcttttcaatgtgggcttcaaagaggccatgaaagacagtgtctgggactgtgtaatcttccacgatgtggatcatctacctgaaaatgaccggaactattacggatgtggagaaatgccacgtcattttgctgcaaagctggataaatacatgtatattcttccatataaagaattttttggtggtgtaagtgggctgacagtggaacaatttagaaagatcaatggttttcctaatgccttctggggatggggaggagaagatgatgacctttggaacagagttcactatgctggatataatgtaaccagaccagagggagacttaggaaaatacaagtcaattcctcatcaccatagaggtgaagtccagtttttaggacggtataaattactaaggtattccaaggagcgtcagtacatcgatggactgaacaatttaatatataggccaaaaatactggttgataggttgtatacaaacatatctgtaaacctcatgccagagttagctccaatcgaagactattaaaagaagtggctgtcgtggcaaggtagaccacaatgctggatcataaacttggagcgcgctcttagtggaggtcagtgattggctgtgtcacagtgcccttttctctgagaagagccagcagtccacagtgtttacagagtgggactatatacagtcacccttctctcacccgtcctccctgctctgagacacacccctgtggcgagcaccgcagaaatgggaagccactacttaagatcggaagttaagagagctccctccgaagagaaaatttttatactaaaatctataatttaattcaagagaatgcttttatttccgtttaaacatattttgtatatatgtgatataaattaatgtgtgcaaattgtttaaaaattagatgtgttgcagttttgcatgtaatcggttatacctttattggacttttatagacattttttatttgcatgaaaaaaactcactaaatttacatcactaaacaaaggttaacccttgtgtgaaatgaaggaactgtcaataattgacagccaactaatacagtaaactgttatactagttttgagctttagacctcagccttttgtgtggaagaagtcacagctttcttaggctttaaaggaaaagaaggaaggacttaaatagcttttcttcctaccgggattacctatgtttttccttgcttgcaatctcatctgattttgctagaaatcacaaccatattgtttatgcatattgcatgagtattaccaagaaaaatcttaaaagttgtgatgtgacatgatataaaggatctctttatgttaaatgtctttccatgtacctctggtgtgtcagggattttgtgcctcaaaaaatgtttccaaggttgtgtgtttatactgtgtattttttttaaattcacggtgaacagcacttttattatttccagttcagaagagccaaaaaaaagtatcttcatttaaaaagaaatcaagtcagtttttttaaaagaatgatctatggaagaaaacccaatagtacttataatatacaaatgaattatactattagataagaattaaatattctatttttataaagataaatacttagtagataaaaacaaattttaagtttagttttcagacatagaatttcacttttggaggggacccttgaatgttagtttcattcaaactatattttgtttttttcacttttaagagattatatctctggtgttaattactaaaattttctttctaaaagtataatttaatagaattatcttaaaatacatgatcagtattcagtgcgctgatattataatgtcttctatatgtagtatctaaaagcataatttaatagcattgtcttaaaatacatgatgagttatttggtgcactgatgccataatgtcttctatatgtaatatcttacatgtttgcatgagtgtcagggctttgtccagttatcttcatatgactgttctctgagaaaaggtcttactacctgatatcaagtacatatcttaattttggatgaatttttccacagtaaagccgaacagtattcttttttgaaaattagcaattataaagattgtttaaaatatcttgatattttcacaaattttaaacaaaaaattaaatatctataaagtgaatgttcaacaacaatgatgagcaatagaaatctatatatgagaaacgtttggataatatttgcctcaaggattgtttacctaaaacagaactatggttatttatctcagattgtaagttttattttgaagtgtcatttttatggcaatattgataacacaaatgaccacaaactaaatcataaaataattgaatccttactttgagaaaatggatagcttctgtgttatgataccaaacaaaatattttcatatttatttcttagaactatttccaaaatatttatatttcagtttttttatggtactcgaaaaatcaaaccttctgaaaattatgatatttgtacttcatttgtgtattagttcattttctgtttctattacatagtttttaaagtcaatgaaagagattgagaatgttaacatttgttgatcaatgtggagctgtccacattcggtatcttttcatttttatatatattttacagtttcaagaaaacttagtactactagtatctgccttattttcttaagtctgatgttaatttttgtttcaggagtgagatataaacattttgctttttttcagttttgaaatatagtttgtcatcctgtgaaaaccacctcgtttgctttttgtttgtttgttttgcttttttagtgtagacctaaaattatttttgcctataaacagtgaacttaatatgtttctgtgagagtgacagagctgtgcccgtttatcttcattgtattaattattacataaagattaacaaatacattgcaaatgcaaatt

SEQ ID NO: 13 - DNA, 2005 bp, Homo sapiens
gcggattcccgccccgaggtttctaaatccagacattcccgtttggctgagcactctaggcctacatccatgaagctaggagagcgacactcaaagactgcactattgagagaagctaacgttaaaggcagtgaatatattcgggagtccagctccggaacccgggagctcttttagtgggaggggcggcgctgatggcgcttctggcctccgaatgctagggggcgctgtgatcgccgggcggcctcttgggcgctgggagtccaccgcgcaagcgcatcctggcctttcttcagtccccacgtgcgatccttcccggcaactttttcgagaaaaatgcccaaattcaaggcggcccgtggggtggggggtcaggaaaaacatgcgcccctggccgatcagatcctggctgggaatgcggtgcgggcgggggtccgggagaagcggcggggtcgcgggacaggagaagcggaggaagagtatgtggggccccggctgagccgacggattttgcagcaagcacggcagcaacaggaggaactcgaggccgagcatgggactggggacaagcccgcggcgccgcgggaacgcaccacgcggctgggtccaagaatgcctcaggatggatcagatgacgaggacgaggagtggcccaccctggagaaggctgccacaatgacagcagcgggccatcatgcagaggtggttgtggaccctgaggatgagcgtgccatagagatgttcatgaacaagaaccctcctgccaggcgcaccctggctgacatcatcatggagaagctgactgagaagcagacagaggttgagacagtcatgtcagaggtgtcgggcttccctatgccccagctggacccccgggtcctagaagtgtacaggggggtccgggaggtattatctaagtaccgcagtggaaaactgcccaaggcatttaagatcatccctgcactctccaactgggagcaaatcctctacgtcacagagccggaggcctggactgcagctgccatgtaccaggccaccaggatttttgcctctaacctgaaggaacgcatggcccagcgcttctacaaccttgtcctgctccctcgagtacgagatgacgttgctgaatacaaacgactcaacttccatctctacatggctctcaagaaggcccttttcaaacctggagcctggttcaaagggatcctgattccactgtgcgagtctggcacttgtaccctccgggaagccatcattgtgggtagcatcatcaccaagtgctccatccctgtgttgcactccagtgcggccatgctgaaaattgctgagatggaatacagcggtgccaacagcatcttcctgcgactgctgctggataagaagtatgcactgccttaccgggtgctggatgccctagtcttccacttcctggggttccggacagagaagcgtgaactgcctgtgctgtggcaccagtgcctcctgactttggtccagcgctacaaggccgacttggccacagaccagaaagaggccctcttagaactgctccggctgcagccccatccacagctatcgcccgaaatcaggcgtgagcttcagagtgcagtcccccgcgatgtggaagatgttcccatcaccgtggagtgaggaaaacagtcagctgtcctggccaaaggggtttggaaggacaccaagacccccgttggtgactgaagatgacactgagctttaatggctgaagacccagatcagggcagtgacagatcacagggacatctgtggctcccagtccaggacaggaaggactgagggtctggctggttccctcttccattctaggcccttatccctgtttagttctgagagccaacttgagataccatatgctagcattcccagtccccagctggggcttggtgtgagtactttttctatggctattgtgtcaggtcactgtggataaaggcaaagacagatatttattgaaaaaaaaaaaaaaaaa

SEQ ID NO: 14 - DNA, 11389 bp, Homo sapiens
atggcgccgccgccgccgcccgtgctgcccgtgctgctgctcctggccgccgccgccgccctgccggcgatggggctgcgagcggccgcctgggagccgcgcgtacccggcgggacccgcgccttcgccctccggcccggctgtacctacgcggtgggcgccgcttgcacgccccgggcgccgcgggagctgctggacgtgggccgcgatgggcggctggcaggacgtcggcgcgtctcgggcgcggggcgcccgctgccgctgcaagtccgcttggtggcccgcagtgccccgacggcgctgagccgccgcctgcgggcgcgcacgcaccttcccggctgcggagcccgtgcccggctctgcggaaccggtgcccggctctgcggggcgctctgcttccccgtccccggcggctgcgcggccgcgcagcattcggcgctcgcagctccgaccaccttacccgcctgccgctgcccgccgcgccccaggccccgctgtcccggccgtcccatctgcctgccgccgggcggctcggtccgcctgcgtctgctgtgcgccctgcggcgcgcggctggcgccgtccgggtgggactggcgctggaggccgccaccgcggggacgccctccgcgtcgccatccccatcgccgcccctgccgccgaacttgcccgaagcccgggcggggccggcgcgacgggcccggcggggcacgagcggcagagggagcctgaagtttccgatgcccaactaccaggtggcgttgtttgagaacgaaccggcgggcaccctcatcctccagctgcacgcgcactacaccatcgagggcgaggaggagcgcgtgagctattacatggaggggctgttcgacgagcgctcccggggctacttccgaatcgactctgccacgggcgccgtgagcacggacagcgtactggaccgcgagaccaaggagacgcacgtcctcagggtgaaagccgtggactacagtacgccgccgcgctcggccaccacctacatcactgtcttggtcaaagacaccaacgaccacagcccggtcttcgagcagtcggagtaccgcgagcgcgtgcgggagaacctggaggtgggctacgaggtgctgaccatccgcgccagcgaccgcgactcgcccatcaacgccaacttgcgttaccgcgtgttggggggcgcgtgggacgtcttccagctcaacgagagctctggcgtggtgagcacacgggcggtgctggaccgggaggaggcggccgagtaccagctcctggtggaggccaacgaccaggggcgcaatccgggcccgctcagtgccacggccaccgtgtacatcgaggtggaggacgagaacgacaactacccccagttcagcgagcagaactacgtggtccaggtgcccgaggacgtggggctcaacacggctgtgctgcgagtgcaggccacggaccgggaccagggccagaacgcggccattcactacagcatcctcagcgggaacgtggccggccagttctacctgcactcgctgagcgggatcctggatgtgatcaaccccttggatttcgaggatgtccagaaatactcgctgagcattaaggcccaggatgggggccggcccccgctcatcaattcttcaggggtggtgtctgtgcaggtgctggatgtcaacgacaacgagcctatctttgtgagcagccccttccaggccacggtgctggagaatgtgcccctgggctaccccgtggtgcacattcaggcggtggacgcggactctggagagaacgcccggctgcactatcgcctggtggacacggcctccacctttctggggggcggcagcgctgggcctaagaatcctgcccccacccctgacttccccttccagatccacaacagctccggttggatcacagtgtgtgccgagctggaccgcgaggaggtggagcactacagcttcggggtggaggcggtggaccacggctcgccccccatgagctcctccaccagcgtgtccatcacggtgctggacgtgaatgacaacgacccggtgttcacgcagcccacctacgagcttcgtctgaatgaggatgcggccgtggggagcagcgtgctgaccctgcaggcccgcgaccgtgacgccaacagtgtgattacctaccagctcacaggcggcaacacccggaaccgctttgcactcagcagccagagagggggcggcctcatcaccctggcgctacctctggactacaagcaggagcagcagtacgtgctggcggtgacagcatccgacggcacacggtcgcacactgcgcatgtcctaatcaacgtcactgatgccaacacccacaggcctgtctttcagagctcccattacacagtgagtgtcagtgaggacaggcctgtgggcacctccattgctaccctcagtgccaacgatgaggacacaggagagaatgcccgcatcacctacgtgattcaggaccccgtgccgcagttccgcattgaccccgacagtggcaccatgtacaccatgatggagctggactatgagaaccaggtcgcctacacgctgaccatcatggcccaggacaacggcatcccgcagaaatcagacaccaccaccctagagatcctcatcctcgatgccaatgacaatgcaccccagttcctgtgggatttctaccagggttccatctttgaggatgctccaccctcgaccagcatcctccaggtctctgccacggaccgggactcaggtcccaatgggcgtctgctgtacaccttccagggtggggacgacggcgatggggacttctacatcgagcccacgtccggtgtgattcgcacccagcgccggctggaccgggagaatgtggccgtgtacaacctttgggctctggctgtggatcggggcagtcccactccccttagcgcctcggtagaaatccaggtgaccatcttggacattaatgacaatgcccccatgtttgagaaggacgaactggagctgtttgttgaggagaacaacccagtggggtcggtggtggcaaagattcgtgctaacgaccctgatgaaggccctaatgcccagatcatgtatcagattgtggaaggggacatgcggcatttcttccagctggacctgctcaacggggacctgcgtgccatggtggagctggactttgaggtccggcgggagtatgtgctggtggtgcaggccacgtcggctccgctggtgagccgagccacggtgcacatccttctcgtggaccagaatgacaacccgcctgtgctgcccgacttccagatcctcttcaacaactatgtcaccaacaagtccaacagtttccccaccggcgtgatcggctgcatcccggcccatgaccccgacgtgtcagacagcctcaactacaccttcgtgcagggcaacgagctgcgcctgttgctgctggaccccgccacgggcgaactgcagctcagccgcgacctggacaacaaccggccgctggaggcgctcatggaggtgtctgtgtctgatggcatccacagcgtcacggccttctgcaccctgcgtgtcaccatcatcacggacgacatgctgaccaacagcatcactgtccgcctggagaacatgtcccaggagaagttcctgtccccgctgctggccctcttcgtggagggggtggccgccgtgctgtccaccaccaaggacgacgtcttcgtcttcaacgtccagaacgacaccgacgtcagctccaacatcctgaacgtgaccttctcggcgctgctgcctggcggcgtccgcggccagttcttcccgtcggaggacctgcaggagcagatctacctgaatcggacgctgctgaccaccatctccacgcagcgcgtgctgcccttcgacgacaacatctgcctgcgcgagccctgcgagaactacatgaagtgcgtgtccgttctgcgattcgacagctccgcgcccttcctcagctccaccaccgtgctcttccggcccatccaccccatcaacggcctgcgctgccgctgcccgcccggcttcaccggcgactactgcgagacggagatcgacctctgctactccgacccgtgcggcgccaacggccgctgccgcagccgcgagggcggctacacctgcgagtgcttcgaggacttcactggagagcactgtgaggtggatgcccgctcaggccgctgtgccaacggggtgtgcaagaacgggggcacctgcgtgaacctgctcatcggcggcttccactgcgtgtgtcctcctggcgagtatgagaggccctactgtgaggtgaccaccaggagcttcccgccccagtccttcgtcaccttccggggcctgagacagcgcttccacttcaccatctccctcacgtttgccactcaggaaaggaacggcttgcttctctacaacggccgcttcaatgagaagcacgacttcatcgccctggagatcgtggacgagcaggtgcagctcaccttctctgcaggcgagacaacaacgaccgtggcaccgaaggttcccagtggtgtgagtgacgggcggtggcactctgtgcaggtgcagtactacaacaagcccaatattggccacctgggcctgccccatgggccgtccggggaaaagatggccgtggtgacagtggatgattgtgacacaaccatggctgtgcgctttggaaaggacatcgggaactacagctgcgctgcccagggcactcagaccggctccaagaagtccctggatctgaccggccctctactcctggggggtgtccccaacctgccagaagacttcccagtgcacaaccggcagttcgtgggctgcatgcggaacctgtcagtcgacggcaaaaatgtggacatggccggattcatcgccaacaatggcacccgggaaggctgcgctgctcggaggaacttctgcgatgggaggcggtgtcagaatggaggcacctgtgtcaacaggtggaatatgtatctgtgtgagtgtccactccgattcggcgggaagaactgtgagcaagccatgcctcacccccagctcttcagcggtgagagcgtcgtgtcctggagtgacctgaacatcatcatctctgtgccctggtacctggggctcatgttccggacccggaaggaggacagcgttctgatggaggccaccagtggtgggcccaccagctttcgcctccagatcctgaacaactacctccagtttgaggtgtcccacggcccctccgatgtggagtccgtgatgctgtccgggttgcgggtgaccgacggggagtggcaccacctgctgatcgagctgaagaatgttaaggaggacagtgagatgaagcacctggtcaccatgaccttggactatgggatggaccagaacaaggcagatatcgggggcatgcttcccgggctgacggtaaggagcgtggtggtcggaggcgcctctgaagacaaggtctccgtgcgccgtggattccgaggctgcatgcagggagtgaggatgggggggacgcccaccaacgtcgccaccctgaacatgaacaacgcactcaaggtcagggtgaaggacggctgtgatgtggacgacccctgtacctcgagcccctgtccccccaatagccgctgccacgacgcctgggaggactacagctgcgtctgtgacaaagggtaccttggaataaactgtgtggatgcctgtcacctgaacccctgcgagaacatgggggcctgcgtgcgctcccccggctccccgcagggctacgtgtgcgagtgtgggcccagtcactacgggccgtactgtgagaacaaactcgaccttccgtgccccagaggctggtgggggaaccccgtctgtggaccctgccactgtgccgtcagcaaaggctttgatcccgactgtaataagaccaacggccagtgccaatgcaaggagaattactacaagctcctagcccaggacacctgtctgccctgcgactgcttcccccatggctcccacagccgcacttgcgacatggccaccgggcagtgtgcctgcaagcccggcgtcatcggccgccagtgcaaccgctgcgacaacccgtttgccgaggtcaccacgctcggctgtgaagtgatctacaatggctgtcccaaagcatttgaggccggcatctggtggccacagaccaagttcgggcagccggctgcggtgccatgccctaagggatccgttggaaatgcggtccgacactgcagcggggagaagggctggctgcccccagagctctttaactgtaccaccatctccttcgtggacctcagggccatgaatgagaagctgagccgcaatgagacgcaggtggacggcgccagggccctgcagctggtgagggcgctgcgcagtgctacacagcacacgggcacgctctttggcaatgacgtgcgcacggcctaccagctgctgggccacgtccttcagcacgagagctggcagcagggcttcgacctggcagccacgcaggacgccgactttcacgaggacgtcatccactcgggcagcgccctcctggccccagccaccagggcggcgtgggagcagatccagcggagcgagggcggcacggcacagctgctccggcgcctcgagggctacttcagcaacgtggcacgcaacgtgcggcggacgtacctgcggcccttcgtcatcgtcaccgccaacatgattcttgctgtcgacatctttgacaagttcaactttacgggagccagggtcccgcgattcgacaccatccatgaagagttccccagggagctggagtcctccgtctccttcccagccgacttcttcagaccacctgaagaaaaagaaggccccctgctgaggccggctggccggaggaccaccccgcagaccacgcgcccggggcctggcaccgagagggaggccccgatcagcaggcggaggcgacaccctgatgacgctggccagttcgccgtcgctctggtcatcatttaccgcaccctggggcagctcctgcccgagcgctacgaccccgaccgtcgcagcctccggttgcctcaccggcccatcattaataccccgatggtgagcacgctggtgtacagcgagggggctccgctcccgagacccctggagaggcccgtcctggtggagttcgccctgctggaggtggaggagcgaaccaagcctgtctgcgtgttctggaaccactccctggccgttggtgggacgggagggtggtctgcccggggctgcgagctcctgtccaggaaccggacacatgtcgcctgccagtgcagccacacagccagctttgcggtgctcatggatatctccaggcgtgagaacggggaggtcctgcctctgaagattgtcacctatgccgctgtgtccttgtcactggcagccctgctggtggccttcgtcctcctgagcctggtccgcatgctgcgctccaacctgcacagcattcacaagcacctcgccgtggcgctcttcctctctcagctggtgttcgtgattgggatcaaccagacggaaaacccgtttctgtgcacagtggttgccatcctcctccactacatctacatgagcacctttgcctggaccctcgtggagagcctgcatgtctaccgcatgctgaccgaggtgcgcaacatcgacacggggcccatgcggttctactacgtcgtgggctggggcatcccggccattgtcacaggactggcggtcggcctggacccccagggctacgggaaccccgacttctgctggctgtcgcttcaagacaccctgatttggagctttgcggggcccatcggagctgttataatcatcaacacagtcacttctgtcctatctgcaaaggtttcctgccaaagaaagcaccattattatgggaaaaaagggatcgtctccctgctgaggaccgcattcctcctgctgctgctcatcagcgccacctggctgctggggctgctggctgtgaaccgcgatgcactgagctttcactacctcttcgccatcttcagcggcttacagggccccttcgtcctccttttccactgcgtgctcaaccaggaggtccggaagcacctgaagggcgtgctcggcgggaggaagctgcacctggaggactccgccaccaccagggccaccctgctgacgcgctccctcaactgcaacaccaccttcggtgacgggcctgacatgctgcgcacagacttgggcgagtccaccgcctcgctggacagcatcgtcagggatgaagggatccagaagctcggcgtgtcctctgggctggtgaggggcagccacggagagccagacgcgtccctcatgcccaggagctgcaaggatccccctggccacgattccgactcagatagcgagctgtccctggatgagcagagcagctcttacgcctcctcacactcgtcagacagcgaggacgatggggtgggagctgaggaaaaatgggacccggccaggggcgccgtccacagcacccccaaaggggacgctgtggccaaccacgttccggccggctggcccgaccagagcctggctgagagtgacagtgaggaccccagcggcaagccccgcctgaaggtggagaccaaggtcagcgtggagctgcaccgcgaggagcagggcagtcaccgtggagagtaccccccggaccaggagagcgggggcgcagccaggcttgctagcagccagcccccagagcagaggaaaggcatcttgaaaaataaagtcacctacccgccgccgctgacgctgacggagcagacgctgaagggccggctccgggagaagctggccgactgtgagcagagccccacatcctcgcgcacgtcttccctgggctctggcggccccgactgcgccatcacagtcaagagccctgggagggagccggggcgtgaccacctcaacggggtggccatgaatgtgcgcactgggagcgcccaggccgatggctccgactctgagaaaccgtgaggcaagcccgtcaccccacacaggctgcggcatcaccctcagaccttggagcccaaggggccactgcccttgaagtggagtgggcccagagtgtggcggtccccatggtggcagccccccgactgatcatccagacacaaaggtcttggttctcccaggagctcagggcctgtcagacctggtgacaagtgccaaaggccacaggcatgagggaggcgtggaccactgggccagcaccgctgagtcctaagactgcagtcaaagccagaactgagaggggaccccagactgggcccagaggctggccagagttcaggaacgccgggcacagaccaaagaccgcggtccagccccgcccaggcgggcatctcatggcagtgcggacccgtggctggcagcccgggcagtcctttgcaaaggcaccccttgtcttaaaatcacttcgctatgtgggaaaggtggagatacttttatatatttgtatgggactctgaggaggtgcaacctgtatatatattgcattcgtgctgactttgttatcccgagagatccatgcaatgatctcttgctgtcttctctgtcaagattgcacagttgtacttgaatctggcatgtgttgacgaaactggtgccccagcagatcaaaggtgggaaatacgtcagcagtggggctaaaaccaagcggctagaagccctacagctgccttcggccaggaagtgaggatggtgtgggccctccccgccggccccctgggtccccagtgttcgctgtgtgtgcgtttgtcctctgctgccatctgccccggctgtgtgaattcaagacagggcagtgcagcactaggcaggtgtgaggagccctgctgaggtcactgtggggcacggttgccacacggctgtcatttttcacctggtcattctgtgaccaccaccccctcccctcaccgcctcccaggtggcccgggagctgcaggtggggatggctttgtcctttgctcctgctccccgtgggacctgggaccttaaagcgttgcaggttcctgatttggacagaggtgtggggccttccaggccgttacatacctcctgccaattctctaactctctgagactgcgaggatctccaggcagggttctcccctctggagtctgaccaattacttcattttgcttcaaatggccaattgtgcagagggacaaagccacagccacactcttcaacggttaccaaactgtttttggaaattcacaccaaggtcgggcccactgcaggcagctggcacagcgtggcccgaggggctgtggaacgggtcccggaactgtcagacatgtttgattttagcgtttcctttgttcttcaaatcaggtgcccaaataagtgatcagcacagctgcttccaaataggagaaaccataaaataggatgaaaatcaagtaaaatgcaaagatgtccacactgttttaaacttgaccctgatgaaaatgtgagcactgttagcagatgcctatgggagaggaaaagcgtatctgaaaatggtccaggacaggaggatgaaatgagatcccagagtcctcacacctgaatgaattatacatgtgccttaccaggtgagtggtctttcgaagataaaaaactctagtccctttaaacgtttgcccctggcgtttcctaagtacgaaaaggtttttaagtcttcgaacagtctcctttcatgactttaacaggattctgccccctgaggtgtaatttttttgttctatttttttccacgtactccacagccaacatcacgaggtgtaatttttaatttgatcagaactgttaccaaaaaacaactgtcagttttattgagatgggaaaaatgtaaacctatttttattacttaagactttatgggagagattagacactggaggtttttaacagaacgtgtatttattaatgttcaaaacactggaattacaaatgagaagagtctacaataaattaagatttttgaatttgtacttctgcggtgctggtttttctccacaaacacccccgcccctccccatgcccagggtggccgtggaagggacggtttacggacgtgcagctgagctgtccgtgtcccatgctccctcagccagtggaacgtgccggaactttttgtccattccctagtaggcctgccacagcctagatgggcagtttttgtctttcaccaaatttgaggactttttttttttgccattatttcttcagttttcttttcttgcactgatctttctcctctccttctgtgactccagtgactcagacgttagacctcttgatgttttcccactggtccctgaggctctgttc

SEQ ID NO: 15 - DNA, 1322 bp, Homo sapiens
tagcttggcacgaggctcgggtcgttgtggtgcgctgtcttcccgcttgcgtcagggacctgcccgactcagtggccgccatggcatcagatgaaggcaaactttttgttggagggctgagttttgacaccaatgagcagtcgctggagcaggtcttctcaaagtacggacagatctctgaagtggtggttgtgaaagacagggagacccagagatctcggggatttgggtttgtcacctttgagaacattgacgacgctaaggatgccatgatggccatgaatgggaagtctgtagatggacggcagatccgagtagaccaggcaggcaagtcgtcagacaaccgatcccgtgggtaccgtggtggctctgccgggggccggggcttcttccgtgggggccgaggacggggccgtgggttctctagaggaggaggggaccgaggctatggggggaaccggttcgagtccaggagtgggggctacggaggctccagagactactatagcagccggagtcagagtggtggctacagtgaccggagctcgggcgggtcctacagagacagttacgacagttacgctacacacaacgagtaaaaacccttcctgctcaagatcgtccttccaatggctgtgtgtttaaagattgtgggagcttcgctgaacgttaatgtgtagtaaatgcacctccttgtattcccactttcgtagtcatttcggttctgatcttgtcaaacccagcctgaccgcttctgacgccgggatggcctcgttactagacttttctttttaaggaagtgctgtttttttttgagggttttcaaaacattttgaaaagcatttacttttttgaccacgagccatgagttttcaaaaaaatcgggggttgtgtgggtttttggtttttgttttagtttttggttgcgttgccttttttttttagtggggttggccccatgaagtgggtgccccactcacttctctgagatcgaacggactgtgaatccgctctttgtcggaagctgagcaagctgtggcttttttccaactccgtgtgacgtttctgagtgtagtgtggtaggacccggcgggtgtgcagcaactgccctggagccccagcccctgcgtccatctgtgctgtgcgccccacagtagacgtgcagacgtccctgagaggttcttgaagatgtttatttatattgtccttttttactggaagacgtacgcatactccatcgatgttgtatttgcagtggctgaggaattcttgtacgcagttttctttggctttacgagccgattaaaagaccgtgtgaaatg

SEQ ID NO: 16 - DNA, 4058 bp, Homo sapiens
gccgcttctcttccccttccgtgggtcagggccggtccggtccggaacctgcagcccctttcccagtgttctagttcgcccgtgacccggaataatgagcaaggagggtgtggtgggttgaaagccatcctactttactcccgagttagagcatggattcagttttagtcttaagggggaagtgagattggagatttttatttttaattttgggcagaagcaggttgactctagggatctccagagcgagaggatttaacttcatgttgctcccgtgtttgaaggaggacaataaaagtcccaccgggcaaaattttcgtaacctctgcggtagaaaacgtcaggtatcttttaaatcgcgatagttttcgctgtgtcaggctttcttcggtggagctccgagggtagctaggttctaggtttgaaacagatgcagaatccaaaggcagcgcaaaaaacagccaccgattttgctatgtctctgagctgcgagataatcagacagctaaatggagtctgagcagctgttccatagaggctactatagaaacagctacaacagtataacaagtgcaagtagtgatgaggaacttttagatggagcaggtgttattatggactttcaaacatctgaagatgacaatttattagatggtgacactgcagttggaactcattatacaatgacaaatggaggcagcattaacagttctacacatttactggatcttttggatgaaccaattccaggtgttggtacatatgatgatttccatactattgattgggtgcgagaaaaatgtaaagacagagaaaggcatagacggatcaacagcaaaaagaaagaatcagcatgggaaatgacaaaaagtttgtatgatgcgtggtcaggatggctagtagtaacactaacaggattggcatcaggggcactggccggattaatagacattgctgccgattggatgactgacctaaaggagggcatttgccttagtgcgttgtggtacaaccacgaacagtgctgttggggatctaatgaaacaacatttgaagagagggataaatgtccacagtggaaaacatgggcagaattaatcataggtcaagcagagggtcctggttcttatatcatgaactacataatgtacatcttctgggccttgagttttgcctttcttgcagtttccctggtaaaggtatttgctccatatgcctgtggctctggaattccagagattaaaactattttaagtggattcatcatcagaggttacttgggaaaatggactttaatgattaaaaccatcacattagtcctggctgtggcatcaggtttgagtttaggaaaagaaggtcccctggtacatgttgcctgttgctgcggaaatatcttttcctacctctttccaaagtatagcacaaacgaagctaaaaaaagggaggtgctatcagctgcctcagctgcaggggtttctgtagcttttggtgcaccaattggaggagttctttttagcctggaagaggttagctattattttcctctcaaaactttatggagatcattttttgctgctttagtggctgcatttgttttgaggtccatcaatccatttggtaacagccgtctggtccttttttatgtggagtatcatacaccatggtacctttttgaactgtttccttttattcttctaggggtatttggagggctttggggagcctttttcattagggcaaatattgcctggtgtcgtcgacgcaagtccacgaaatttggaaagtatcccgttctggaagtcattattgttgcagccattactgctgtgatagccttccctaatccatacactaggctaaacaccagtgaactgatcaaagagctttttacagactgtggtcccctggaatcctcttctctttgtgactacagaaatgacatgaatgccagtaaaattgtcgatgacattcctgatcgtccagcaggcattggagtatattcagctatatggcagttatgcctggcactcatatttaaaatcataatgacagtattcacttttggcatcaaggttccatcaggcttgttcatccccagcatggccattggagcgatcgcaggaaggattgtggggattgcggtggagcagcttgcctactatcaccacgactggtttatctttaaggagtggtgtgaggtcggggctgattgcattacacctggcctttatgccatggttggtgctgctgcatgcttaggtggtgtgacaagaatgactgtctccctggtggttattgtttttgagcttactggaggcttggaatatattgttccccttatggctgcagtcatgaccagtaaatgggttggagatgcctttggcagggaaggcatttatgaagcacacatccgattaaatggataccctttcttggatgcaaaagaagaattcactcataccaccctggctgctgacgttatgagacctcgaaggaatgatcctcccttagctgtcctgacacaggacaatatgacagtggatgatatagaaaacatgattaatgaaaccagctacaatggatttcctgtcataatgtcaaaagaatctcagagattagtgggatttgccctcagaagagacctgacaattgcaatagaaagtgccaggaaaaaacaagaaggtatcgttggcagttctcgggtgtgttttgcacagcacaccccatctcttccagcagaaagtcctcggccattgaagcttcgaagcattcttgacatgagcccttttacagtgacagaccacaccccaatggagatcgtggtggatattttccgaaagctgggactgaggcagtgccttgtaactcacaatgggattgtcttggggatcatcacaaagaagaacatattagagcatctcgagcaactaaagcagcacgtcgaacccttggcgcctccttggcattataacaaaaaaagatatcctccggcatatggcccagacggcaaaccaagaccccgcttcaataatgttcaactgaatctcacagatgaggagagagaagaaacggaagaggaagtttatttgttgaatagcacaactctttaacctgagggagtcatctacttttttttcctcctttacaaaaaaagaaaggaaatataaaagccgggtttttgcaacatggtttgcaaataatgctggtggaatggaggagttgtttggggagggaaaggagagagaaggaaaggagtgaggtatttcccgtctaacagaaagcagcgtatcaactcctattgttctgcactggatgcattcagctgaggatgtgcctgatagtgcaggcttgcgcctcaacagagatgacagcagagtcctcgagcacctggcctgttgctccaacattgcaaagacacattatcagtccctatttctagagggattactttgaattgagccatctataaaactgcaaggtcttgcccttttttttaatcaaaactgttctgtttaattcatgaattgtatagttaagcattacctttctacattccagaagagcctttatttctctctctctctctctctctctctctctctctactgagctgtaacaaagcctctttaaatcggtgtatccttttgaagcagtcctttctcatattgagatgtactgtgattttactgaggtttcatcacaagaagggagtgtttcttgtgccattaaccatgtagtttgtaccatcactaaatgcttggaacagtacacatgcaccacaacaaaggctcatcaaacaggtaaagtctcgaaggaagcgagaacgaaatctctcattgtgtgccgtgtggctcaaaaccgaaaacaatgaagcttggttttaaaggataaagttttcttttttgttttcctctcagactttatggataatgtgaccgggtcttatgcaaattttctatttctaaaactactactatgatatacaagtgctgttgagcataattaaataaaatgctgctgctttgacagtaaagagaaggaagtattctgaaaaaaaa

SEQ ID NO: 17 - DNA, 691 bp, Homo sapiens
gacccctcacactcacctagccaccatggacatcgccatccaccacccctggatccgccgccccttctttcctttccactcccccagccgcctctttgaccagttcttcggagagcacctgttggagtctgatcttttcccgacgtctacttccctgagtcccttctaccttcggccaccctccttcctgcgggcacccagctggtttgacactggactctcagagatgcgcctggagaaggacaggttctctgtcaacctggatgtgaagcacttctccccagaggaactcaaagttaaggtgttgggagatgtgattgaggtgcatggaaaacatgaagagcgccaggatgaacatggtttcatctccagggagttccacaggaaataccggatcccagctgatgtagaccctctcaccattacttcatccctgtcatctgatggggtcctcactgtgaatggaccaaggaaacaggtctctggccctgagcgcaccattcccatcacccgtgaagagaagcctgctgtcaccgcagcccccaagaaatagatgccctttcttgaattgcattttttaaaacaagaaagtttccccaccagtgaatgaaagtcttgtgactagtgctgaagcttattaatgctaagggcaggcccaaattatcaagctaataaaatatcattcagcaac

SEQ ID NO: 18 - DNA, 2943 bp, Homo sapiens
ccgaaagagaaaacaggccgcgcgggcggcagaggagccgggcgccgcaatggacgtgcgggcgctgccgtggctgccgtggctgctgtggctgctgtgccggggcggcggcgatgcggactcccgcgcccccttcaccccgacctggccgcggagccgcgagcgtgaagccgccgccttccgggaaagtcttaatagacatcgatacttgaattctttatttcccagtgaaaactccaccgccttctatggaataaatcagttttcctatttgtttcctgaagagtttaaagccatttatttaagaagcaaaccttccaagtttcccagatactcagcagaagtacatatgtccatccccaatgtgtctttgccgttaagatttgactggagggacaagcaggttgtgacacaagtgagaaaccagcagatgtgtggaggatgctgggccttcagcgtggtgggggcagtggaatctgcttatgcaataaaggggaagcccctggaagacctaagtgtccagcaggtcattgactgttcgtataataattatggctgcaatggaggctctactctcaatgctttgaactggttaaacaagatgcaagtaaaactggtgaaagattcagaatatccttttaaagcacaaaatggtctgtgccattacttttctggttcacattctggattttcaatcaaaggttattctgcatatgacttcagtgaccaagaagatgaaatggcaaaagcacttcttacctttggccctttggtagtcatagtagatgcagtgagctggcaagattatctgggaggcattatacagcatcactgctctagtggagaagcaaatcatgcagttctcataactgggtttgataaaacaggaagcactccatattggattgtgcggaattcctggggaagttcttggggagtagatggttatgcccatgtcaaaatgggaagtaatgtttgtggtattgcagattccgtttcttctatatttgtgtgacatgttgggcagatcaagagacagctacaaaaatgaaggttttcataatgcaatgtaacatagtacttcaaagtattattcaacttcaagtttcagcaactacctacaaaagattctaaggcctagtagtatttaaactaagtttcagaatgttcccttcttgtagagagatggacaaccaaagtcagtgggacaaactccagcacagaagcctgcgaggaagcctatggaatagtttcctgtcctgagacgaaattcagattaggagatattttaggcccctgcaactggggaaggctactgtttgtttttgtttgcttattatttatttgtttgtttattgtgagatatttcaggtgggatcaaagaggtcataagaatttattttcttttgtggggtgtaactactagctttagattacccctatacacaagaatggccaacctaaaattatgtgtgtcttgtacagttagttatattagcagccctctgagatggcgtatctatcggaaggatttcaaacaccaattgctttacctgaacaaatggtgcttaccctttgaacagcagagtgaccacgtagaaggaaggaaaagggcaaaatcgcttcagttaaactgaaattaaatgaacaataaggcaactatataagtaacttctagtagcattgcctgagagacaaattattgtttgataattttcattgtgaataggaatccaatagatcatattgcttactttgttctttttatactatagaataatattttgttctctagtatatcaaaataccaaaatattatctcatattttctccctctttctcttactctttaccaagttttcctggtggcttggcttccctgactaaagaattaagtctcatttttactttccatttctattttcttaccacttggttggctccctttgtctctgtacctttaccaacattaggatctcacctctttcttcctcccttaattcataagcaccactcctatcaaagtcccatctcttaaccctgggtatcaaacaaactgtgagttttccagaatctgtttcccagttttcccctcagctttcctggtctcccatccgaactgcttctttgtgcacctcttgttctttctcttggctcccagtcttgattcctgtgatcactcttgcatcactaattgcacaagtgatttcaggtgcaattctgattagcctgcgtccacacagtgatcgatgatcctatgtgcctagaaaggacactgtgtgctgctcatgacctgcaacaggaaaaaagccatttcttgttagcagtgtaagaaccttagagcaaaggagttgaccttctgattgaatataagcacaaccatattaaatgaatcaatacaagaaaattatttctgatactatgtatgtacatatttcttctctaaaatgtatcattcttttctaatgtatatgatctaacaaaaatgaaacatgaaatgcagtagcaaccactaaaaaaaaaaattcaaggacatctaactttttctctcacttttgccctttgtttatccttccctgtgattagataaacaaaataaaaaacaaaatgctgtatttctcttcttacgccagtcagaaccaatccgaaaagaatgtgtgttgactcaggtttggagttatttcaggaagacagatattgaccttttaattgataaatattcttattatcctggaatgccagaaaagaactatgtcctgcttgtctagtttgtattcgctgactttctatgtgatatagatgcatttgtaatactctttttcaagtgctaaaggatttctaaaatttcaaactgattaatatgtttctgctgttctggattttgatgacatttacaataaaacaacctacatttgactttggtttaaaaagaaaaaaaaaaaa

SEQ ID NO: 19 - DNA, 1044 bp, Homo sapiens
caaccctgccaggctctccaatcgcatgtggaattatcgctctacccaggcggtggtgtcgatctacgttccaattggggccgtaccatggcggagaagactcaaaagagtgtgaagattgctcctggagcagttgtatgtgtagaaagtgaaatcagaggagatgtaactatcggacctcggacagtgatccaccctaaagcaagaattattgcggaagccgggccaatagtgattggcgaagggaacctaatagaagaacaggcccttatcataaatgcttacccagataatatcactcctgacactgaagatccagaaccaaaacctatgatcattggcaccaataatgtgtttgaagttggctgttattcccaagccatgaagatgggagataataatgtcattgaatcaaaagcatatgtaggcagaaatgtaatattgacaagtggctgcatcattggggcttgttgcaacctaaatacatttgaagtcatccctgagaatacggtgatctatggtgcagactgccttcgtcgggtgcagactgagcgaccgcagccccagacactacagctggatttcttgatgaaaatcttgccaaattaccaccacctaaagaagactatgaaaggaagctcaactccagtaaagaactaagaacagtgtataacatgaagataacattttgtctttgaccactgtcttttgaatgggcccacagtgtttatgtactcttaacaactcacagaataatacatgttcactttattttgtaaaattgggttgagaggaaactaatggagtttcattgtaactgtcctttgtaatttatataaatgtattattttcctatatccttggttcttttctgataatttacagatttagcttttcttttgttatataaactgctagccacaaattttagttatgtaaaaggctacccttgacaagaaaagacatactgtcatgtatttatattctagcatagactaaactgaataaaaatgctgataacaggacctttaaaaaaaaaaaaaa

SEQ ID NO: 20 - DNA, 927 bp, Homo sapiens
gaggtcagagacttaagtctaaggcactgagcgtatcatgttaaagatgagcgggtggcagcgacagagccaaaatcagagctggaacctgaggagagagtgttcaagaaggaagtgtatcttcatacatcaccacacctgaaagcagatgtgcttttccagactgatccaactgcagagatggcagctgagtcattgcctttctccttcgggacactgtccagctgggagctggaagcctggtatgaggacctgcaagaggtcctgtcttcagatgaaaatgggggtacctatgtttcacctcctggaaatgaagaggaagaatcaaaaatcttcaccactcttgaccctgcttctctggcttggctgactgaggaggagccagaaccagcagaggtcacaagcacctcccagagccctcactctccagattccagtcagagctccctggctcaggaggaagaggaggaagaccaagggagaaccaggaaacggaaacagagtggtcattccccagcccgggctggaaagcagcgcatgaaggagaaagaacaggagaatgaaaggaaagtggcacagctagctgaagagaatgaacggctcaagcaggaaatcgagcgcctgaccagggaagtagaggcgactcgccgagctctgattgaccgaatggtgaatctgcaccaagcatgaacaattgggagcatcagtcccccacttgggccacactacccacctttcccagaagtggctactgactaccctctcactagtgccaatgatgtgaccctcaatcccacatacgcagggggaaggcttggagtagacaaaaggaaaggtctcagcttgtatatagagattgtacatttatttattactgtccctatctattaaagtgactttctatgagccaaaaaaaaaaaaaaaaaa

SEQ ID NO: 21 - DNA, 1534 bp, Homo sapiens
ggaagcgcagcaactcgtgtctgagcgcccggcggaaaaccgaagttggaagtgtctcttagcagcgcgcggagaagaacggggagccagcatcatggcagaacaggatgtggaaaacgatcttttggattacgatgaagaggaagagccccaggctcctcaagagagcacaccagctccccctaagaaagacatcaagggatcctacgtttccatccacagctctggcttccgggactttctgctgaagccggagctcctgcgggccatcgtggactgtggctttgagcatccttctgaggtccagcatgagtgcattccccaggccatcctgggcatggacgtcctgtgccaggccaagtccgggatgggcaagacagcggtcttcgtgctggccaccctacagcagattgagcctgtcaacggacaggtgacggtcctggtcatgtgccacacgagggagctggccttccagatcagcaaggaatatgagcgcttttccaagtacatgcccagcgtcaaggtgtctgtgttcttcggtggtctctccatcaagaaggatgaagaagtgttgaagaagaactgtccccatgtcgtggtggggaccccgggccgcatcctggcgctcgtgcggaataggagcttcagcctaaagaatgtgaagcactttgtgctggacgagtgtgacaagatgctggagcagctggacatgcggcgggatgtgcaggagatcttccgcctgacaccacacgagaagcagtgcatgatgttcagcgccaccctgagcaaggacatccggcctgtgtgcaggaagttcatgcaggatcccatggaggtgtttgtggacgacgagaccaagctcacgctgcacggcctgcagcagtactacgtcaaactcaaagacagtgagaagaaccgcaagctctttgatctcttggatgtgctggagtttaaccaggtgataatcttcgtcaagtcagtgcagcgctgcatggccctggcccagctcctcgtggagcagaacttcccggccatcgccatccaccggggcatggcccaggaggagcgcctgtcacgctatcagcagttcaaggatttccagcggcggatcctggtggccaccaatctgtttggccgggggatggacatcgagcgagtcaacatcgtctttaactacgacatgcctgaggactcggacacctacctgcaccgggtggcccgggcgggtcgctttggcaccaaaggcctagccatcacttttgtgtctgacgagaatgatgccaaaatcctcaatgacgtccaggaccggtttgaagttaatgtggcagaacttccagaggaaatcgacatctccacatacatcgagcagagccggtaaccaccacgtgccagagccgcccacccggagccgcccgcatgcagcttcacctcccctttccaggcgccactgttgagaagctagagattgtatgagaataaacttgttattatggaaaaaaaaaaaaaaaaaaaaaaaaaaaaaaaaaaaaaaaaa

SEQ ID NO: 22 - DNA, 1984 bp, Homo sapiens
tatggattaaaatttataaaatacagatcagttaatattgcacttaagtaattttacctttttaatgtgatttttatagaataattcagacttacaaatacagagatatgaacaaagtttacagtgggaacaaaggtttaaaaaaaggttgtggttctctctctgtgatccagtgtgcacataaacctttctctgatctttcactgccatcctctggattatgtcttctgacctgtccattttgacccattaactggaaagttggaaaactacattaactggaaagttgaaaaactacattactttggagaataaaaccgaaagttcgtgtataccttcttaaaaaaaaaatcaaaccaaaaatgtgaaaacaatagaactgcaaagatagcagttaaaattttaatctgaaaataacctttgaatctcgggctaggttacgtccatatttgaagtggtcagtgatggtttgaacattttttgcaggatgagttaaaatgcactggattatatttgggatttttgtttttggaattgtctgttttaatcacagccttaattcacaattggcaaaggcagtttactcaaaggactgggctaaatattctgtaattattcatttttgataggaaaatgaaatttttgcaaacagacattttcttttttttggctggagtgcagtggggcatggtcttggctcactgcagcgttgaccacctgggctcaagtgatactcccgcctcagccacccaagtagctggcactacgggcacacgccaccatgcccagctaatttttttgtatttttagtagagatggggttttgccatgctgcccaggctggtctcaactcctcagctcaagcaatctgcctgcgtgagcctcccaaagtggtggaattacaggcgtgggccactgcgcctggcccagacagacattttctgaaacacaactggcaatgagctgtttttacattttgaaagtgattcttcacttcctagttcttaattatagtatacctattaagatctgtaagatcctgaagacataagatcatgaagccatataagaatgaggattgaaagttgagcaaaattttcgggattttgggaaacattcttagctgtgctatctgcctaaaattattccttattacttctctcctttgacagacttcaagttttcttcatagccctttcaaagttttttgagccatccagagtaaaatcatttctaaatgatagttctgtatatctccaactcgtcttaagtgtatttgcctgtgtgcaacgtattgctagactatgaactcctcagcatggctgctggataacttaattgtcctgagttaatagccttcaaaggacaaatcggtttctttgcagatagcttcgtaaaacttcacatggagtttattttatcatatttcccttttttatttctgctcctcctttaattgcccatcttgcttcagagactgacatttcagggtggatattaattaaagcattaattttgttttttggtatattcctatccctagtatttctatcttactgctaaaatacaggaaaagtgccgtatttttaatgcatttagtggttttctttggtgttatctgttccatttttctttttcatacattgaagtgtgtctccttttcaaccaaaataatgaaatagtggagaccatgaaattgttgtgcctggctaattggcaaattaatttaccaatataataagtgtagcgccttgtttgaataccctttttgagaaggtatgatgagaatgggcaagggtgtcagcatctcttcttcttaataattaattgttttcagttttggttcacgaagaatgcttagttaatctgtaatgttgcctagagctgtatttatctgtttttatttatactagtgtagtaaagctgcatatcattacagtaaaaaaaaaaaaaaaaaaaaaaaaagaaaaaaaaaaaaaaaaaa

SEQ ID NO: 23 - DNA, 4213 bp, Homo sapiens
tccactcctggagcccgcggaccccgagcacgcgcctgacagcccctgctggcccggcgcgcggcgtcgccaggccagctatggcccccgacccggtggccgccgagaccgcggctcagggacctaccccgcgctacttcacctgggacgaggtggcccagcgctcagggtgcgaggagcggtggctagtgatcgaccgtaaggtgtacaacatcagcgagttcacccgccggcatccagggggctcccgggtcatcagccactacgccgggcaggatgccacggatccctttgtggccttccacatcaacaagggccttgtgaagaagtatatgaactctctcctgattggagaactgtctccagagcagcccagctttgagcccaccaagaataaagagctgacagatgagttccgggagctgcgggccacagtggagcggatggggctcatgaaggccaaccatgtcttcttcctgctgtacctgctgcacatcttgctgctggatggtgcagcctggctcaccctttgggtctttgggacgtcctttttgcccttcctcctctgtgcggtgctgctcagtgcagttcaggcccaggctggctggctgcagcatgactttgggcacctgtcggtcttcagcacctcaaagtggaaccatctgctacatcattttgtgattggccacctgaagggggcccccgccagttggtggaaccacatgcacttccagcaccatgccaagcccaactgcttccgcaaagacccagacatcaacatgcatcccttcttctttgccttggggaagatcctctctgtggagcttgggaaacagaagaaaaaatatatgccgtacaaccaccagcacaaatacttcttcctaattgggcccccagccttgctgcctctctacttccagtggtatattttctattttgttatccagcgaaagaagtgggtggacttggcctggatgattaccttctacgtccgcttcttcctcacttatgtgccactattggggctgaaagccttcctgggccttttcttcatagtcaggttcctggaaagcaactggtttgtgtgggtgacacagatgaaccatattcccatgcacattgatcatgaccggaacatggactgggtttccacccagctccaggccacatgcaatgtccacaagtctgccttcaatgactggttcagtggacacctcaacttccagattgagcaccatctttttcccacgatgcctcgacacaattaccacaaagtggctcccctggtgcagtccttgtgtgccaagcatggcatagagtaccagtccaagcccctgctgtcagccttcgccgacatcatccactcactaaaggagtcagggcagctctggctagatgcctatcttcaccaataacaacagccaccctgcccagtctggaagaagaggaggaagactctggagccaaggcagaggggagcttgagggacaatgccactatagtttaatactcagagggggttgggtttggggacataaagcctctgactcaaactcctcccttttatcttctagccacagttctaagacccaaagtggggggtggacacagaagtccctaggagggaaggagctgttggggcaggggtgtaaattatttcctttttctagtttggcacatgcaggtagttggtgaacagagagaaccaggagggtaacagaagaggagggacctactgaacccagagtcaggaagagatttaacactaaaattccactcatgccgggcgtggtggcacgcgcctgtaatcccagctacccaggaggctgaggcaggagaatcgcttgaaccggggaggtggaggttgcagtgagctgagatcacgccattgtactccagcctgggcgacagagcaagactccatttcaaaaaaaaaaaaaaaatccactcatataaaaggtgagctcagctcactggtccatttctcagtggcttctccatcctcatttgcaaacctcagagggataaggcagttgaacctgatgagcaagaattataacagcaaggaaacattaatgcttagaattctgagatccagcacaactcagtctgtgggagctcagctcgctgcccagggataggtatgacctatgtctgccttaggctgctgggagatgccattctccagtttcagaagcaggcagggcaaaggtcaagactgtggtattggggtcttttggctctgaaggatcctggaaccactgattttggtttattccctccagggtctaaagagaacaagaggtgctagctcttaccaaaacagatggtagagagagttgctggctatttaaaaagctctttcatcttttaattcacctcttcttttcacctctttaaccactcctcaggaacagaacacttctaggactgggggtcttttagctccataagcaagtgagcagatgggacaagttagtcttttctccctagaaacaaaggggatgcccagtggtttccctttgcttcccaacctaaaatttcaagtttaataaaatagcaattagcagaagtgaccaaattgggagataattatcagtcatgaggaaagacacagatttcggtcataaagaatgtaagggctataagtagaaactttctataacctaaatgatgttatagaattatttttgagcaggagcagaaagattaaatatgatcacttcatacttctaaatcagaaataggaagattaaaaccacagaacagtttgtgatttctattgctgtagctaggtatcttactctgtccactcttgttcaagtatctaactcttctggaaaccaaataggctttagaagagattatcctatattcctatcagtataatactaaaatgtaactttttaatcatctggtttttaaaagataaacagtttagcccatctctccagagagcaaacataggaatatgactcaggagcctcctagggcttatcatcagccctcacacccgcttccccctccaacccacagcctttgcttccaggtggcaggattactactttgcctcttcagcagcatctactctaggcatattgatcattttagacactgggagaagagaacctcaaactaggaggaaaagacagagcctccacttagttttgggaggggatggcagacagtcaaggagatgagcgtcctaaggcatgttgggatagggtcagatgcaccacccatggagaggtttgtcaacacaaagacatggaaggttagaggtttgtcaacaaaaagacatggaaggttaggtttgtcaacacaaagacatggaagattagaggtttgtcaacacaaagacacaggaagaatgggctgcagaagatttagatgttttccatttgggcacattttacttagctggagaactaggtttaaaacagcctgggtaggaaaattagaagcaagctggatgcagtggctcatgcctgtaatcccaacacttttgggaggtccaggcaggaggatcacttgggcccaggaggtcaagcctgcagcgagctgagatcacaccactgcactccagcctggggtgatagaacaagaccctgtctcaaaaaaaaaaaaaaacaacaaaaacttagaattgaggagttgtacctccattggcttcctcactccaaaataggtgctgatccttcctattcctattctttgccaccttttgggtgtggtgtcaccagcctgtttagccaagtagctttgggcataggctgcccaatctgagcaaacaccagtgaggctctattgagccaagaccaagtcctcaaagcacctgaaccactgtggccttctcagcctacagcagtgtggtctcttacatggccacaaagggacacacagtgacaaaaggctcggaatgttacaatggtaaaatgagtgatctcaaatccactgacagatataaaataggcttagagaggaaaagctgcctctggtcaagtagatcatggcagcatgaattccaactcacttttttacaactccaacttctatgtttatctttgttactttcacttttttacaacctggccagaggcattttttaaatcaggcccaatatcagtattctttttgtgtgtgccaattttgttatcacatccctatgaagttgaaaaataaagttaattttgaccaaaaaaaaaaaaaaaag

SEQ ID NO: 24 - DNA, 5937 bp, Homo sapiens
ctgctcctgcgcggcagctgctttagaaggtctcgagcctcctgtaccttcccagggatgaaccgggccttccctctggaaggcgagggttcgggccacagtgagcgagggccagggcggtgggcgcgcgcagagggaaaccggatcagttgagagagaatcaagagtagcggatgaggcgcttgtggggcgcggcccggaagccctcgggcgcgggctgggagaaggagtgggcggaggcgccgcaggaggctcccggggcctggtcgggccggctgggccccgggcgcagtggaagaaagggacgggcggtgcccggttgggcgtcctggccagctcaccttgccctggcggctcgccccgcccggcacttgggaggagcagggcagggcccgcggcctttgcattctgggaccgcccccttccattcccgggccagcggcgagcggcagcgacggctggagccgcagctacagcatgagagccggtgccgctcctccacgcctgcggacgcgtggcgagcggaggcagcgctgcctgttcgcgccatgggggcaccgtggggctcgccgacggcggcggcgggcgggcggcgcgggtggcgccgaggccgggggctgccatggaccgtctgtgtgctggcggccgccggcttgacgtgtacggcgctgatcacctacgcttgctgggggcagctgccgccgctgccctgggcgtcgccaaccccgtcgcgaccggtgggcgtgctgctgtggtgggagcccttcggggggcgcgatagcgccccgaggccgccccctgactgccggctgcgcttcaacatcagcggctgccgcctgctcaccgaccgcgcgtcctacggagaggctcaggccgtgcttttccaccaccgcgacctcgtgaaggggccccccgactggcccccgccctggggcatccaggcgcacactgccgaggaggtggatctgcgcgtgttggactacgaggaggcagcggcggcggcagaagccctggcgacctccagccccaggcccccgggccagcgctgggtttggatgaacttcgagtcgccctcgcactccccggggctgcgaagcctggcaagtaacctcttcaactggacgctctcctaccgggcggactcggacgtctttgtgccttatggctacctctaccccagaagccaccccggcgacccgccctcaggcctggccccgccactgtccaggaaacaggggctggtggcatgggtggtgagccactgggacgagcgccaggcccgggtccgctactaccaccaactgagccaacatgtgaccgtggacgtgttcggccggggcgggccggggcagccggtgcccgaaattgggctcctgcacacagtggcccgctacaagttctacctggctttcgagaactcgcagcacctggattatatcaccgagaagctctggcgcaacgcgttgctcgctggggcggtgccggtggtgctgggcccagaccgtgccaactacgagcgctttgtgccccgcggcgccttcatccacgtggacgacttcccaagtgcctcctccctggcctcgtacctgcttttcctcgaccgcaaccccgcggtctatcgccgctacttccactggcgccggagctacgctgtccacatcacctccttctgggacgagccttggtgccgggtgtgccaggctgtacagagggctggggaccggcccaagagcatacggaacttggccagctggttcgagcggtgaagccgcgctcccctggaagcgacccaggggaggccaagttgtcagctttttgatcctctactgtgcatctccttgactgccgcatcatgggagtaagttcttcaaacacccatttttgctctatgggaaaaaaacgatttaccaattaatattactcagcacagagatgggggcccggtttccatattttttgcacagctagcaattgggctccctttgctgctgatgggcatcattgtttaggggtgaaggagggggttcttcctcaccttgtaaccagtgcagaaatgaaatagcttagcggcaagaagccgttgaggcggtttcctgaatttccccatctgccacaggccatatttgtggcccgtgcagcttccaaatctcatacacaactgttcccgattcacgtttttctggaccaaggtgaagcaaatttgtggttgtagaaggagccttgttggtggagagtggaaggactgtggctgcaggtgggactttgttgtttggattcctcacagccttggctcctgagaaaggtgaggagggcagtccaagaggggccgctgacttctttcacaagtactatctgttcccctgtcctgtgaatggaagcaaagtgctggattgtccttggaggaaacttaagatgaatacatgcgtgtacctcactttacataagaaatgtattcctgaaaagctgcatttaaatcaagtcccaaattcattgacttaggggagttcagtatttaatgaaaccctatggagaatttatccctttacaatgtgaatagtcatctcctaatttgtttcttctgtctttatgtttttctataacctggattttttaaatcatattaaaattacagatgtgaaaataaagcagaagcaacctttttccctcttcccagaaaaccagtctgtgtttacagacagaagagaaggaagccatagtgtcacttccacacaattatttatttcatgtctttactggacctgaaatttaaactgcaatgccagtcctgcaggagtgctggcattaccctctgcagaacagtgaaaggtattgcactacattatggaatcatgcaaaaggaaaaaaagtttcatgatatctgttgttggcagtttttgtttatctctgacagtttttagttaaatgtttagatcctcagaactacattagtgcctactattaacttactctgtctcttgttaaaggctaaatctgcgcttctccctggtgccagcaggttcccctcacagtcaatgcagtggtatagcatatcctcacatttctagtgcccttgagactgtgctatggaaccaatcttgaacatacatgcattgacttgacaagttactgagtaagcagcatattcagcaggtgccactacatgcctactctgccagacactgagcttggggccctagggaagatagagaattatacaaggcaaagtccttctctttagggctcttacaatctatcacttccaaaaagtaaatggtgactgataaaacaattggcagaacctgtttgattactgtgacagtcttaatgataccataaatcaatattagaaagctagttgacttaaagcctgaaataatgggagttttctcctccacttattagaataaggaccctcagtgactaattattgtgggtagggtcaagattaactagttttatacagagttctgctgtaaatagtcattttgcatttgattagtgcagttctctgaatcataaagcaagttttacctctctgtacatgtttttgcagacatacttgaaaagctcacttaaatctaggtgcttcaattcactttcttgagaggacaaatgaaaagctgtggagaaaatgtcctcattaaagtattaaagtgtgggcagaattacaattacaaagtgccagccaccgaataaagataaaagttcagttcttaaaatgagtttttatgagataacagtcagtgatcttggtgttaccgggattccacatggggcagtgggaaagagttcaggttttgaaggtaacctagtttagatttgaattccagctatgtgacattgggtaaattagtagtagtcctgagcctcagcgtcctcatctataaaatgactggcgaaaatacttcacaagctcattttgagcactttaggaagtaagtgaaagtacctaaaatagcaggcacccaattgatgattttatatcttccttctttgcttgcagtgatttcaggatgtcctcatatctatttataggtctaaaattatatcttaaggtatgttgtagaataaattaaaaggataatctaaatcaccatttagattaagcttgacttgcaaactaggaagaagcacctaggctttctttgaaaatatttttttggttcgttttggtaaagctctataaattggtatctattattttaccaatttttttttagtattaagtccatttagaactaaccatattatttatggaataattagcatgaggaaggtataattgcattttttttttttttagacggagcttgcactgtagccccagctggactgcagtggcgtgatcttggctcactgcaacctccgcctcccaggttcaagcgattctcctgcctcagcctcccgagcagctgagactacaggcgcctgccaccacgcctggccaattttttgtatttttagtagagactgcgtttcaccatgttgggcaggctggtcttgaactcctgaccttgtgatccacctgcctcggcctctcagagagctgggattacaggtgtgagccgccgtgcccagccattgcatttttattcacatacacattgttaatgtggaacaatttaacactaatctcatcagagagcgagatgaatgtggcaattgctcattttattttgcatatattaaattgagtaggttcagctctaacataccttaagaaaaatgcatatcggtgcactgtatgtatttcaaaatgcctttcctatgattgtcatgtcctcctttaaggcttttccctcaaatttattacaaatttagtatttttagtacttgatgactctaattacatgaatgcacctggaatgacatttgtaacagaagacggtctgacttgctttcagtattcacaagttctttccagtttccaagtcttttcctagcagtaatttaggggagacagaggagtttcatgtaaagagcatgcagtttggagtcagaacctgggtatgactctgtggccttgatgaagcaagttacttaaactcttgagttttagctttctcctttacaatgcatgaatgcctatccccctacaaaacaaagattaaatgtgatgatgtatgccaaggtgctttgtatattgtaaagtgctatataattataagatgttctaaattttcaaggatctaaaccagggattggcaaacgtttttccagggagtaaatattttacgctttgcatatataatttatggaggtgttgagaggatagattagacacttgaagtactcaggatagtgcctggcatgtaggaagcacctggaaaatattcgctgtgattaccatcagtccattttaccgaggaaggagccaaggtccaggcccactgaaggacttgcataacattacaatagcagtggcagaaccagccatgcttctgcaaatcacaacctctttgagcctctgtcacctgaactgcaaaatgagtgggttagacaaaatcatctgttgggacctcctagttccacgtgctatcattctactaactggcaccctaaggttgaaagtgcttatctgctttccaatgtggcttccttacagtctggaactgacaatatgcaggagcagtaaactggcagaaaaccaggaatcagagaaagaaaatataatttaactttaaagatgtaaattatatatatagtatattatatatatttttaaagctttatatgcctcaaatatcagggaaaggagccaagtccttggtatttagtttggtgaatacttgcattgaatacatgtcaagatgtcaagtcatttttgaatgtgtctcagggatttctatgctacacattcttttaacaaatcaagtatttatgtacacatgttcagattttttgacaaaatgattaaaataatgagatggaaaatga

SEQ ID NO: 25 - DNA, 4350 bp, Homo sapiens
agttgagggattgacacaaatggtcaggcggcggcggcggagaaggaggcggaggcgcaggggggagccgagcccgctgggctgcggagagttgcgctctctacggggccgcggccactagcgcggcgccgccagccgggagccagcgagccgagggccaggaaggcgggacacgaccccggcgcgccctagccacccgggttctccccgccgcccgcgcttcatgaatcgcaagtttccgcggcggcggcggctgcggtacgcagaacaggagccgggggagcgggccgaaagcggcttgggctcgacggagggcacccgcgcagaggtctccctggccgcagggggagccgccgccggccgtgcccctggcagccccagcggagcggcgccaagagaggagccgagaaagtatggctgaggaggaggcgcctaagaagtcccgggccgccggcggtggcgcgagctgggaactttgtgccggggcgctctcggcccggctggcggaggagggcagcggggacgccggtggccgccgccgcccgccagttgacccccggcgattggcgcgccagctgctgctgctgctttggctgctggaggctccgctgctgctgggggtccgggcccaggcggcgggccaggggccaggccaggggcccgggccggggcagcaaccgccgccgccgcctcagcagcaacagagcgggcagcagtacaacggcgagcggggcatctccgtcccggaccacggctattgccagcccatctccatcccgctgtgcacggacatcgcgtacaaccagaccatcatgcccaacctgctgggccacacgaaccaggaggacgcgggcctggaggtgcaccagttctaccctctagtgaaagtgcagtgttccgctgagctcaagttcttcctgtgctccatgtacgcgcccgtgtgcaccgtgctagagcaggcgctgccgccctgccgctccctgtgcgagcgcgcgcgccagggctgcgaggcgctcatgaacaagttcggcttccagtggccagacacgctcaagtgtgagaagttcccggtgcacggcgccggcgagctgtgcgtgggccagaacacgtccgacaagggcaccccgacgccctcgctgcttccagagttctggaccagcaaccctcagcacggcggcggagggcaccgtggcggcttcccggggggcgccggcgcgtcggagcgaggcaagttctcctgcccgcgcgccctcaaggtgccctcctacctcaactaccacttcctgggggagaaggactgcggcgcaccttgtgagccgaccaaggtgtatgggctcatgtacttcgggcccgaggagctgcgcttctcgcgcacctggattggcatttggtcagtgctgtgctgcgcctccacgctcttcacggtgcttacgtacctggtggacatgcggcgcttcagctacccggagcggcccatcatcttcttgtccggctgttacacggccgtggccgtggcctacatcgccggcttcctcctggaagaccgagtggtgtgtaatgacaagttcgccgaggacggggcacgcactgtggcgcagggcaccaagaaggagggctgcaccatcctcttcatgatgctctacttcttcagcatggccagctccatctggtgggtgatcctgtcgctcacctggttcctggcggctggcatgaagtggggccacgaggccatcgaagccaactcacagtattttcacctggccgcctgggctgtgccggccatcaagaccatcaccatcctggcgctgggccaggtggacggcgatgtgctgagcggagtgtgcttcgtggggcttaacaacgtggacgcgctgcgtggcttcgtgctggcgcccctcttcgtgtacctgtttatcggcacgtcctttctgctggccggctttgtgtcgctcttccgcatccgcaccatcatgaagcacgatggcaccaagaccgagaagctggagaagctcatggtgcgcattggcgtcttcagcgtgctgtacactgtgccagccaccatcgtcatcgcctgctacttctacgagcaggccttccgggaccagtgggaacgcagctgggtggcccagagctgcaagagctacgctatcccctgccctcacctccaggcgggcggaggcgccccgccgcacccgcccatgagcccggacttcacggtcttcatgattaagtaccttatgacgctgatcgtgggcatcacgtcgggcttctggatctggtccggcaagaccctcaactcctggaggaagttctacacgaggctcaccaacagcaaacaaggggagactacagtctgagacccggggctcagcccatgcccaggcctcggccggggcgcagcgatcccccaaagccagcgccgtggagttcgtgccaatcctgacatctcgaggtttcctcactagacaactctctttcgcaggctcctttgaacaactcagctcctgcaaaagcttccgtccctgaggcaaaaggacacgagggcccgactgccagagggaggatggacagacctcttgccctcacactctggtaccaggactgttcgcttttatgattgtaaatagcctgtgtaagatttttgtaagtatatttgtatttaaatgacgaccgatcacgcgtttttctttttcaaaagtttttaattatttagggcggtttaaccatttgaggcttttccttcttgcccttttcggagtattgcaaaggagctaaaactggtgtgcaaccgcacagcgctcctggtcgtcctcgcgcgcctctccctaccacgggtgctcgggacggctgggcgccagctccggggcgagttcagcactgcggggtgcgactagggctgcgctgccagggtcacttcccgcctcctccttttgccccctccccctccttctgtcccctccctttctttcctggcttgaggtaggggctcttaaggtacagaactccacaaaccttccaaatctggaggagggcccccatacattacaattcctcccttgctcggcggtggattgcgaaggcccgtcccttcgacttcctgaagctggatttttaactgtccagaactttcctccaacttcatgggggcccacgggtgtgggcgctggcagtctcagcctccctccacggtcaccttcaacgcccagacactcccttctcccaccttagttggttacagggtgagtgagataaccaatgccaaactttttgaagtctaatttttgaggggtgagctcatttcattctctagtgtctaaaacctggtatgggtttggccagcgtcatggaaagatgtggttactgagatttgggaagaagcatgaagctttgtgtgggttggaagagactgaagatatgggttataaaatgttaattctaattgcatacggatgcctggcaaccttgcctttgagaatgagacagcctgcgcttagattttaccggtctgtaaaatggaaatgttgaggtcacctggaaagctttgttaaggagttgatgtttgctttccttaacaagacagcaaaacgtaaacagaaattgaaaacttgaaggatatttcagtgtcatggacttcctcaaaatgaagtgctattttcttatttttaatcaaataactagacatatatcagaaactttaaaatgtaaaagttgtacactttcaacattttattacgattattattcagcagcacattctgaggggggaacaattcacaccaccaataataacctggtaagatttcaggaggtaaagaaggtggaataattgacggggagatagcgcctgaaataaacaaaatatgggcatgcatgctaaagggaaaatgtgtgcaggtctactgcattaaatcctgtgtgctcctcttttggatttacagaaatgtgtcaaatgtaaatctttcaaagccatttaaaaatattcactttagttctctgtgaagaagaggagaaaagcaatcctcctgattgtattgttttaaactttaagaatttatcaaaatgccggtacttaggacctaaatttatctatgtctgtcatacgctaaaatgatattggtctttgaatttggtatacatttattctgttcactatcacaaaatcatctatatttatagaggaatagaagtttatatatatataataccatatttttaatttcacaaataaaaaattcaaagttttgtacaaaattatatggattttgtgcctgaaaataatagagcttgagctgtctgaactattttacattttatggtgtctcatagccaatcccacagtgtaaaaattca

SEQ ID NO: 26 - DNA, 2649 bp, Homo sapiens
ctgggacgcagctgcccccgctcggcgcccgctgcacccttagcagccactgccacctgggcccggagcctccacgatctcgcccggcgattgtgggcaggggcgcctccggatcgatcttctgaaattcaagttttcaagatgaagtttttattgacaactgcctttttaattttaatttccttgtgggtggaagaagcctattctaaggaaaagtcttcaaagaaagggaaggggaaaaagaagcagtatctatgcccatctcagcagtcagcagaggaccttgcccgagtacctgccaactccactagcaatatcttgaacaggttattggtcagttatgatcccaggataagaccaaacttcaaaggcattcctgttgatgtagtagtcaacatttttattaacagttttggatccattcaagaaacaacaatggactatagagttaacatcttcctgagacaaaaatggaatgaccccaggctgaagctccccagtgattttaggggttcagatgcactgacagtggatccaacaatgtacaagtgtttatggaaacctgatttattttttgcaaatgaaaaaagtgccaattttcatgatgtgacccaggaaaacatcctcctctttatttttcgtgatggagatgtccttgtcagcatgaggttatctattactctttcatgccctttggacttgacattgtttcccatggatacacaacgttgcaagatgcaactggagagctttggttacacaactgatgatttacgatttatctggcagtcaggagatcctgtgcaattagaaaaaattgccttgcctcaatttgatatcaaaaaggaagatattgaatatggtaactgtacaaaatactataaaggcacgggctactacacatgcgtggaagtcatcttcaccctgaggaggcaggtcggcttttacatgatgggggtctacgccccaaccctgctcattgttgttctctcctggctttccttctggatcaacccggacgcgagtgctgccagagtgcccctgggtatcttctcagtcctcagcttggcctctgagtgcacaacccttgccgctgagcttcccaaagtttcctatgtgaaggctcttgatgtttggcttattgcttgccttctctttgggtttgcttccctggtggagtatgcagttgtccaggtgatgctgaacaaccccaaaagggttgaagctgaaaaagccagaattgctaaggctgagcaagcagatggaaaaggtggaaatgtggctaaaaagaatactgtgaatggaacagggactcctgttcatattagcactttgcaggttggtgagaccagatgcaaaaaagtttgtacttctaagtctgatctgagatctaatgacttcagcattgttggaagcttaccaagagattttgaactatccaattatgactgctatggaaaacccattgaagttaacaacggacttgggaaatctcaggctaagaacaacaagaagcctccccctgcgaaacctgttattccaacagcagcaaagcgaattgatctttatgcaagagcattgtttcctttctgcttcttgttcttcaatgttatatattggtctatatatttatgataaatcttttccatttgtacaaaataaaattccatttcattgtgacctactcctttcataaatgccaatctgtgagaacttttgaattttcatagcaacattgcattttggatgccatttgattgtaataaaactgtggcaccttaattttgaatggcagcatgatcatgtaatatctgtgctctaataacgatgtatatatgtatagtgaacatattgcttagtaacaaatgaaggacaagcatactacataatataatccatacaattctcttcagttagtgtaaactgcaaatactacagataattctgataataaaatgatatgcacgctgaatcctgctatggtcaccattctaatgtatgtagtatttcaaatttccttccttgtaactttcaaagaaagccatcttattcttgtaattttagatggtattatcacagatttaaaaaggttgtattacatattgtttaaactttgtaagtagaaatatatctgttataattatacaggctctgtggagaaataaagttcaaaatatattaatttgtaaaatcagctcgttttaaagtgtgcttgtgttgtcaaaaatatcagatagtaatacacagtgagcatttttaaacaaagggaaacctatatttatgtaactgtatactgaattctgacaaaataaaaaaagataccttattgacgaaatatttaggataaacaaaattctatttaatccaccttaaaacctaaatgtattttcatggatttcatttgttggtacatattacacaaaacattgtgccttaaaatgagtcatacatcttttaaattggaatgcagtaatagatatgtgattttacatcatttttaagaaaccaaggggaagtaataagttgaaaaagaaatccataactattaaaagattttaacttttttattttattaaaatgcttgcatattttaagtaaaattaaaaaaaaaaaaaaaaaaaaaaaaaaaaaaaaaaaaaaaaaaaaaaa

SEQ ID NO: 27 - DNA, 964 bp, Homo sapiens
gagaacacaaagtaaaacttctgctgttcccagtcctgcagccccagcccagccgtcccccgcgggcgtggcaggtcctgagtcagggcctgtccgtggccagcatccctgctgggcgattgagcagcgggaagctgcttggacccagtctcaaacttaaccctcatctagcacccgggcaggcctcctgggttgcagggacttgagaaaaggcagagttctcaggtcctaggaagctggggcacgctggcgtgacaagcgtcccggagaaagccaagccctcggggagctggggaccgcagcagggctgcagtcacatcctgcgcgggtgggcggcgggccaggccttcagttgtttcgggacgcgccgagcttcgccgctcttccagcggctccgctgccagagctagcccgagcccggttctggggcgaaaatgcctgcccttcacatcgaagatttgccagagaaggaaaaactgaaaatggaagttgagcagcttcgcaaagaagtgaagttgcagagacaacaagtgtctaaatgttctgaagaaataaagaactatattgaagaacgttctggagaggatcctctagtaaagggaattccagaagacaagaacccctttaaagaaaaaggcagctgtgttatttcataaataacttgggagaaactgcatcctaagtggaagaactagtttgttttagttttcccagataaaaccaacatgctttttaaggaaggaagaatgaaattaaaaggagactttcttaagcaccatatagatagggttatgtataaaagcatatgtgctactcatctttgctcactatgcagtcttttttaagagagcagagagtatcagatgtacaattatggaaataagaacattacttgagcatgacacttctttcagtatattgcttgatgcttcaaataaagttttgtcttgggaaaaaaaaaaaa

SEQ ID NO: 28 - DNA, 2431 bp, Homo sapiens
ccgggatcctgtgtagcggctgcagagggtgccgccgccctaggcgaagtagggccgtcctgagcgaaagaaccgcccccagcaggagcaccaccacggcttagcaaagaatcccagaccccgcccgggaaggcagccgcaccatggagtcttccagttcatctaactcttatttctccgttggcccaaccagtcccagcgctgtcgtgctcctctactcgaaggagctcaaaaagtgggatgagtttgaagatattttagaagagaggaggcatgtcagtgacttgaaatttgcaatgaaatgctacacacctcttgtctataagggaattactccatgtaaaccaattgatattaaatgtagtgttctcaattctgaggagattcattatgtcattaaacagctttccaaggaatcccttcaatctgtggatgtcctccgagaggaagtgagtgagatcttagatgaaatgagtcacaaactgcgtcttggagccattcggttttgtgccttcaccctgagcaaagtatttaaacaaattttctcgaaggtgtgtgtaaatgaagaaggtattcagaaactacaaagagccatccaggagcatcctgttgttctgctgcctagtcatcgaagttacattgacttcctcatgttgtcttttcttctatacaattatgatttgcctgtgccagttatagcagcaggaatggacttcctgggaatgaaaatggttggtgagctgctacgaatgtcgggtgcctttttcatgcggcgtacctttggtggcaataaactctactgggctgtattctctgaatatgtaaaaactatgttacggaatggttatgctcctgttgaatttttcctcgaagggacaagaagccgctctgccaagacattgactcctaaatttggtcttctgaatattgtgatggagccattttttaaaagagaagtttttgatacctaccttgtcccaattagtatcagttatgataagatcttggaagaaactctttatgtgtatgagcttctaggggttcctaaaccaaaagagtctacaactgggttgctgaaagccagaaagattctctctgaaaattttggaagcatccatgtgtactttggagatcctgtgtcacttcgatctttggcagctgggaggatgagtcggagctcatataacttggttccaagatacattcctcagaaacagtctgaggacatgcatgcctttgtcactgaagttgcctacaaaatggagcttctgcaaattgaaaacatggttttgagcccctggaccctaatagttgctgttctgcttcagaaccggccatccatggactttgatgctctggtggaaaagactttatggctaaaaggcttaacccaggcatttggagggtttctcatttggcctgataataaacctgctgaagaagttgtcccggccagcattcttctgcattccaacattgccagccttgtcaaagaccaggtgattctgaaagtggactccggagactcggaagtggtcgatgggcttatgctccagcacatcactctcctcatgtgctcagcttataggaaccagctgctcaacatttttgtgcgcccatccttagtagcagtagcattgcagatgacaccagggttcaggaaagaggatgtctacagttgctttcgcttcctacgtgatgtttttgcagatgagttcatcttccttccaggaaacacactaaaggactttgaagaaggctgttacctgctttgtaaaagtgaagccatacaagtgactacgaaagacatcctagttacagagaaaggaaatactgtgttagaatttttagtaggactctttaaaccttttgtggaaagctatcagataatttgcaagtaccttttgagtgaagaagaggaccacttcagtgaggaacagtacttggctgcagtcagaaaattcacaagtcagcttctcgatcaaggtacctctcaatgttatgatgtattatcttctgatgtgcagaaaaacgccttagcagcctgtgtgaggctcggagtagtggagaagaagaagataaataataactgtatatttaatgtgaatgaacctgccacaaccaaattagaagaaatgcttggttgtaagacaccaataggaaaaccagccactgcaaaactttaataatcaacaaatagttatggaaaattcggtcacgtaattactctcatcgaaggactcattacaacaaacagggaagtaaaggaagagacacatcctctcatactccctgagactctgagaacagtggacgcagagggaagagatgatcattggaagcaatcagtttactcttccccaccacagtggttaaaaggcgtttgtatctgacactatgtgtgtgttttaaaataaacttttggaaacat

SEQ ID NO: 29 - DNA, 2858 bp, Homo sapiens
ggcgacgggtttggtaagtaggaaagtttcggttgaggagtaagagctgccgcgggagcagtaacccgcgcgggggaggccgacgtcggtcggagagggggtacgagagctgctggtggtgttgtcgtggccggagcggcccgcgcctgggctgccggcacttcgcggcagtcagagcaccataacatggtgtgggaagtgaagacaaatcagatgcctaatgcagtacagaaactcctgttggtgatggacaagagagcctcaggaatgaatgactcattggagttgctgcagtgtaatgagaatttgccatcttcacctggatataactcctgtgatgaacacatggagcttgatgaccttcctgaacttcaggcagttcaaagtgatcctacccaatctggcatgtaccagctgagttcagatgtttcacatcaagaatacccaagatcatcttggaaccaaaatacctcagacataccagaaactacttaccgtgaaaatgaggtggactggctaacagaattggcaaatatcgcgaccagtccacaaagtccactgatgcagtgctcattttacaatagatcatctcctgtacacatcatagccactagcaaaagtttacattcctatgcacgccctccaccagtgtcctcttcttcgaagagtgaaccagccttccctcatcaccattggaaggaggaaacaccagtaagacacgaaagggcaaatagtgagtcagaatctggcattttctgcatgtcctccctgtcagatgatgatgatttgggatggtgcaattcctggccttcaactgtctggcactgttttttgaaaggcacacgactgtgctttcataagggaagcaataaggaatggcaagatgttgaagattttgctagagctgaaggctgtgataatgaggaagatcttcaaatgggcattcacaagggctatggttctgatggtctaaagttgttatcacatgaagaaagtgtatcatttggcgagtctgtactgaagttgacttttgatcctggtacagtagaagatggtttacttaccgtagagtgtaagctggaccaccctttctatgttaaaaataaaggttggtcatcattttatccaagcttgactgtggtacagcatggcattccatgttgtgaagttcatattggcgatgtatgtctacctcctggacaccccgatgccattaattttgatgattcaggtgtttttgatacatttaaaagctatgacttcacacctatggattcttctgcagtttatgtgttaagtagtatggctcgccagcgtcgtgcatctttgtcttgtggaggacctggtggtcaagactttgcaagatctggattcagtaaaaactgtggctcacctggatcatcacagctctcttccaattctttgtatgctaaagctgtcaaaaaccacagctcagggactgtgagtgccacttctcctaataagtgcaaaagaccaatgaatgccttcatgctttttgccaaaaaatacagagttgaatatactcagatgtatccagggaaagataacagagccataagtgtgatccttggtgacaggtggaagaaaatgaagaatgaagagagaagaatgtacacattagaagcaaaggctttggctgaagaacagaaacgtttaaatcctgactgttggaagaggaaaagaaccaattcaggctcacaacaacattaaaccaggatgcttatgttcttaagtctatatttgcatatacattgactcttgatggaaagacttaagaagatcaaggtctcaccatttgtcctcaattcgtgtgaccataagatactgatagcattgagtcttgaaatgatttaataatatgagtgaggatttgctttctccattagagcattaagctaaaactatcaacattttaaaccaaattgccttatttttcttccaaacttcatatatgtctatcaggtaataataggcttgaaaattgatatcctgtggtgctaaagtacagtagaaagagaggagaagtgtatacatgttttattttaaattgtacgaaaggggaatttaaaaaatatgtaactgctgtttatacattggctccttactgcttattaatctgtattgtacacatgatgaaatgaagcagaagctgggagtcggcctttcctctagtaaccaccacatggctcagcatctgtgccaaacataggcgctcctagtctggtcagtgccaagaggctaccagaacatggggcaggtggctggtgttggtgtcccagcctaagagccacctgctgcagttaccatggcatgctgagttgatgcaccaggtggcagcagccatccgttattatttccaatggagacctagcccaggccaaggtaaagttagttaatagcattgggatatagtcactgtaatggtgctattaacaaacagtcaacaccattgtattttttaacttcgtgttctgtatctcctcagccatgtatcttaaatatattttgtcatcataatctttatggtgggggcagactttgcacttactgcagtgcaacacttgcactttaattttcctccaactgtctaaaattagagcaaatacattggcaatacagctgcttttgctctgagctacaatcatggcttttcatgttacttaccaagtggtgtttctggttaggaatcacagctgtaaaattgatttcagttcatcacacttcttcatgatgttgcccctaaattttgcacactatattcttgtatattatttcaaataaatggaaaaaaaagttgcttatctctgaaaaaaaaaaaaaaaaaaaaaaaaaaaaaa

SEQ ID NO: 30 - DNA, 1830 bp, Homo sapiens
gtgaagcacagggttataacgaccacgatccacaaatcaagccctccaaaatcacccaaatgagctcgtactttgtaaactccttctcggggcgttatccaaatggcccggactatcagttgctaaattatggcagtggcagctctctgagcggctcttacagggatcccgctgccatgcacaccggctcttacggctacaattacaatgggatggacctcagcgtcaaccgctcctcggcctcctccagccactttggggcggtgggcgagagctcgcgcgccttccccgcgcccgcccaggagccccgcttcaggcaagcggcttcgagctgctccctgtcctcgcccgagtccctgccctgcaccaacggcgacagccacggcgccaagccctctgcttcgtccccctccgaccaggcgacctcagccagctccagcgccaatttcaccgaaatagacgaggccagcgcgtcctcggagcctgaggaagcggcaagccagctaagcagccccagcctagctcgggcgcagccagagcccatggccacctccacagccgcgcccgaggggcagactccgcaaatattcccctggatgaggaagcttcacatcagccatgatatgaccgggccggacgggaaaagggcccggaccgcgtatacccgctaccagaccctggagctggaaaaggagttccacttcaaccgctacctgacccggcgacggcgcatcgagatcgcccacgcactctgcctgtccgagcgccagatcaagatctggttccagaaccggcgcatgaagtggaagaaggacaacaaattgaaaagtatgagcctggctacagctggcagcgccttccagccctgagcccgcccagaggagcccagcggcccaagagcccgtgccacccccagccctggcccctccaatcctccccgctctgccgccgcccgctggggaccggttcccacaagcctgcctcgccttgtgttacgatatttcgtttggtcttaggtcttcctgtggctccctctctcctggactggttatcttgttattattgttaataataattattattattattttccttccatgctcccaactcccttctgcttgtcccaaatccgccagtgtttctgaatgtttgtgtctgtggttgcagtctttcccccaggaaaaaaaaaaaaagaaattcgcatgtttaatgtgaactctcccctccccatctgtgttctaacttatttataaaaagatgatcgctgtattttgagtttcagctggaaacttctgtaaggggcagcagttgaggtggggtagtgccgcagtggggtcaagctgagctggcttcggagatggagtcccttttcattctcctcctcctccctcctcactccctaggcccaagtctcctaggggcttggtcctagggtgggaaggggctagggaggaccaaagggatggtattgagaagagagaaagaagatagtgagatttaagttcctgctgcctgggtaggccccacaaggcctggtctgggagtatacggaaacaaaaatgatcctcagtgcaaaatgtcttgtgtatttctctgtgaatccatgggtctggctagagggcccaaagcttgtaaatatggggatagtctgggtcagacccatctctcccttacccatcttgcttccaagaccatttgtagtgagcgagtggatgctgtgctacgtgtgaaatctgtctttgcggggcctgtctcagtgattcgcttttggtatttgtttgtagctttcctggaagtcaaataaatgtttcccccactccaaaaaaaaaa

SEQ ID NO: 31 - DNA, 2487 bp, Homo sapiens
ctcctggttcattcaaggtctacatagttaaaggttgttccagagggatgtgtgtaattcctcccagtatttgatgttcctttattacttattttcacttgagccaacagcctgaactggtcaggctttgggctgatgccagctgctttatctggtagcactgttacataaaattaacatttattggtgatcactaggtgccaacattatgcgaagaactttacgtggacatcccatttaattctcagaagccgatcacaagctcttcacggggatttctgctgccgccaccgcccactcttacccccgccgcttctcgactctgttgttagccgaagactcgcctctcagccgcccgccgcacagacgcacgagtaaaaagtgcagctccatcggctgatcctcgctaagctccgactctgggcggcaccgggcgtcccacgatgccgaagaacaagaagcggaacactccccaccgcggtagcagtgctggcggcggcgggtcaggagcagccgcagcgacggcggcgacagcaggtggccagcatcgaaatgttcagccttttagtgatgaagatgcatcaattgaaacaatgagccattgcagtggttatagcgatccttccagttttgctgaagatggaccagaagtccttgatgaggaaggaactcaagaagacctagagtacaagttgaagggattaattgacctaaccctggataagagtgcgaagacaaggcaagcagctcttgaaggtattaaaaatgcactggcttcaaaaatgctgtatgaatttattctggaaaggagaatgactttaactgatagcattgaacgctgcctgaaaaaaggtaagagtgatgagcaacgtgcagctgcagcgttagcatctgttctttgtattcagctgggccctggaattgaaagtgaagagattttgaaaactcttggaccaatcctaaagaaaatcatttgtgatgggtcagctagtatgcaggctaggcaaacttgtgcaacttgctttggtgtttgctgttttattgccacagatgacattactgaactatactcaactctggaatgtttggaaaatatcttcactaaatcctatctcaaagagaaagacactactgttatttgcagcactcctaatacagtgcttcatatcagctctcttcttgcatggacactactgctgaccatatgcccaatcaatgaagtgaagaaaaagcttgagatgcatttccataagcttccaagcctcctctcttgtgatgatgtaaacatgagaatagctgctggtgaatctttggcacttctctttgaattggccagaggaatagagagtgactttttttatgaagacatggagtccttgacgcagatgcttagggccttggcaacagatggaaataaacaccgggccaaagtggacaagagaaagcagcggtcagttttcagagatgtcctgagggcagtggaggaacgggattttccaacagaaaccattaaatttggtcctgaacgcatgtatattgattgctgggtaaaaaaacacacctatgacacctttaaggaggttcttggatcagggatgcagtaccacttgcagtcaaatgaattccttcgaaatgtatttgaacttggacccccagtgatgcttgatgctgcaacgcttaaaacgatgaagatttctcgtttcgaaaggcatttatataactctgcagccttcaaagctcgaaccaaagctagaagcaaatgtcgagataagagagcagatgttggagaattcttctagattttcagaacttgaagactattttctaatttctatttttttttctatttcaatgtatttaaactctagacacagtttttatcctggattaacttagataacttttgtagcagtggttatattgcttataatttaatgtacaatactattgaaactggtgagttctgattattaaatattctctgtaaatcagtaaacatgtataaagtatttgtaatgtttggtcataatttatttatgaagacagcaaaagactgatttcatgatggggaaaacaattagccaaagtttaatttcttacactgtggttgtcaagaatactgatttactataatgatatatacatgcaagatatttaacttaatatcttagacaagagttctgggtacaattttgggatctagttcccctggaaaagctgctgtatttttaatttttaatggaatgtagcttttaaaatcctgtcactggcatcaacaaaaggaattataccatgagaccttatagctgtacttaaaagccattcagttcagctattgggagttcatgatgaattagcatatgccagaaaggttgctaaccttaacatctgagagcagtaacactgattttatctgctgtatgagactttgtgcattttactttgaaataaagatttttttccacactgaaaaaaaaaaaaaaaaaa

SEQ ID NO: 32 - DNA, 4006 bp, Homo sapiens
tgccaaggctccagcccggccgggctccgaggcgagaggctgcatggagtggccggcgcggctctgcgggctgtgggcgctgctgctctgcgccggcggcgggggcgggggcgggggcgccgcgcctacggaaactcagccacctgtgacaaatttgagtgtctctgttgaaaacctctgcacagtaatatggacatggaatccacccgagggagccagctcaaattgtagtctatggtattttagtcattttggcgacaaacaagataagaaaatagctccggaaactcgtcgttcaatagaagtacccctgaatgagaggatttgtctgcaagtggggtcccagtgtagcaccaatgagagtgagaagcctagcattttggttgaaaaatgcatctcacccccagaaggtgatcctgagtctgctgtgactgagcttcaatgcatttggcacaacctgagctacatgaagtgttcttggctccctggaaggaataccagtcccgacactaactatactctctactattggcacagaagcctggaaaaaattcatcaatgtgaaaacatctttagagaaggccaatactttggttgttcctttgatctgaccaaagtgaaggattccagttttgaacaacacagtgtccaaataatggtcaaggataatgcaggaaaaattaaaccatccttcaatatagtgcctttaacttcccgtgtgaaacctgatcctccacatattaaaaacctctccttccacaatgatgacctatatgtgcaatgggagaatccacagaattttattagcagatgcctattttatgaagtagaagtcaataacagccaaactgagacacataatgttttctacgtccaagaggctaaatgtgagaatccagaatttgagagaaatgtggagaatacatcttgtttcatggtccctggtgttcttcctgatactttgaacacagtcagaataagagtcaaaacaaataagttatgctatgaggatgacaaactctggagtaattggagccaagaaatgagtataggtaagaagcgcaattccacactctacataaccatgttactcattgttccagtcatcgtcgcaggtgcaatcatagtactcctgctttacctaaaaaggctcaagattattatattccctccaattcctgatcctggcaagatttttaaagaaatgtttggagaccagaatgatgatactctgcactggaagaagtacgacatctatgagaagcaaaccaaggaggaaaccgactctgtagtgctgatagaaaacctgaagaaagcctctcagtgatggagataatttatttttaccttcactgtgaccttgagaagattcttcccattctccatttgttatctgggaacttattaaatggaaactgaaactactgcaccatttaaaaacaggcagctcataagagccacaggtctttatgttgagtcgcgcaccgaaaaactaaaaataatgggcgctttggagaagagtgtggagtcattctcattgaattataaaagccagcaggcttcaaactaggggacaaagcaaaaagtgatgatagtggtggagttaatcttatcaagagttgtgacaacttcctgagggatctatacttgctttgtgttctttgtgtcaacatgaacaaattttatttgtaggggaactcatttggggtgcaaatgctaatgtcaaacttgagtcacaaagaacatgtagaaaacaaaatggataaaatctgatatgtattgtttgggatcctattgaaccatgtttgtggctattaaaactcttttaacagtctgggctgggtccggtggctcacgcctgtaatcccagcaatttgggagtccgaggcgggcggatcactcgaggtcaggagttccagaccagcctgaccaaaatggtgaaacctcctctctactaaaactacaaaaattaactgggtgtggtggcgcgtgcctgtaatcccagctactcgggaagctgaggcaggtgaattgtttgaacctgggaggtggaggttgcagtgagcagagatcacaccactgcactctagcctgggtgacagagcaagactctgtctaaaaaacaaaacaaaacaaaacaaaacaaaaaaacctcttaatattctggagtcatcattcccttcgacagcattttcctctgctttgaaagccccagaaatcagtgttggccatgatgacaactacagaaaaaccagaggcagcttctttgccaagacctttcaaagccattttaggctgttaggggcagtggaggtagaatgactccttgggtattagagtttcaaccatgaagtctctaacaatgtattttcttcacctctgctactcaagtagcatttactgtgtctttggtttgtgctaggcccccgggtgtgaagcacagaccccttccaggggtttacagtctatttgagactcctcagttcttgccacttttttttttaatctccaccagtcatttttcagaccttttaactcctcaattccaacactgatttccccttttgcattctccctccttcccttccttgtagccttttgactttcattggaaattaggatgtaaatctgctcaggagacctggaggagcagaggataattagcatctcaggttaagtgtgagtaatctgagaaacaatgactaattcttgcatattttgtaacttccatgtgagggttttcagcattgatatttgtgcattttctaaacagagatgaggtggtatcttcacgtagaacattggtattcgcttgagaaaaaaagaatagttgaacctatttctctttctttacaagatgggtccaggattcctcttttctctgccataaatgattaattaaatagcttttgtgtcttacattggtagccagccagccaaggctctgtttatgcttttggggggcatatattgggttccattctcacctatccacacaacatatccgtatatatcccctctactcttacttcccccaaatttaaagaagtatgggaaatgagaggcatttcccccaccccatttctctcctcacacacagactcatattactggtaggaacttgagaactttatttccaagttgttcaaacatttaccaatcatattaatacaatgatgctatttgcaattcctgctcctaggggaggggagataagaaaccctcactctctacaggtttgggtacaagtggcaacctgcttccatggccgtgtagaagcatggtgccctggcttctctgaggaagctggggttcatgacaatggcagatgtaaagttattcttgaagtcagattgaggctgggagacagccgtagtagatgttctactttgttctgctgttctctagaaagaatatttggttttcctgtataggaatgagattaattcctttccaggtattttataattctgggaagcaaaacccatgcctccccctagccatttttactgttatcctatttagatggccatgaagaggatgctgtgaaattcccaacaaacattgatgctgacagtcatgcagtctgggagtggggaagtgatcttttgttcccatcctcttcttttagcagtaaaatagctgagggaaaagggagggaaaaggaagttatgggaatacctgtggtggttgtgatccctaggtcttgggagctcttggaggtgtctgtatcagtggatttcccatcccctgtgggaaattagtaggctcatttactgttttaggtctagcctatgtggattttttcctaacatacctaagcaaacccagtgtcaggatggtaattcttattctttcgttcagttaagtttttcccttcatctgggcactgaagggatatgtgaaacaatgttaacatttttggtagtcttcaaccagggattgtttctgtttaacttcttataggaaagcttgagtaaaataaatattgtctttttgtatgtca

SEQ ID NO: 33 - DNA, 5053 bp, Homo sapiens
tgcagacagtgcgggcctgcgcccagtcccggctgtcctcgccgcgacccctcctcagccctgggcgcgcgcacgctggggccccgcggggctggccgcctagcgagcctgccggtcgaccccagccagcgcagcgacggggcgctgcctggcccaggcgcacacggaagtgcgcttctctgaagtagctttggaaagtagagaagaaaatccagtttgcttcttggagaacactggacagctgaataaatgcagtatctaaatataaaagaggactgcaatgccatggctttctgtgctaaaatgaggagctccaagaagactgaggtgaacctggaggcccctgagccaggggtggaagtgatcttctatctgtcggacagggagcccctccggctgggcagtggagagtacacagcagaggaactgtgcatcagggctgcacaggcatgccgtatctctcctctttgtcacaacctctttgccctgtatgacgagaacaccaagctctggtatgctccaaatcgcaccatcaccgttgatgacaagatgtccctccggctccactaccggatgaggttctatttcaccaattggcatggaaccaacgacaatgagcagtcagtgtggcgtcattctccaaagaagcagaaaaatggctacgagaaaaaaaagattccagatgcaacccctctccttgatgccagctcactggagtatctgtttgctcagggacagtatgatttggtgaaatgcctggctcctattcgagaccccaagaccgagcaggatggacatgatattgagaacgagtgtctagggatggctgtcctggccatctcacactatgccatgatgaagaagatgcagttgccagaactgcccaaggacatcagctacaagcgatatattccagaaacattgaataagtccatcagacagaggaaccttctcaccaggatgcggataaataatgttttcaaggatttcctaaaggaatttaacaacaagaccatttgtgacagcagcgtgtccacgcatgacctgaaggtgaaatacttggctaccttggaaactttgacaaaacattacggtgctgaaatatttgagacttccatgttactgatttcatcagaaaatgagatgaattggtttcattcgaatgacggtggaaacgttctctactacgaagtgatggtgactgggaatcttggaatccagtggaggcataaaccaaatgttgtttctgttgaaaaggaaaaaaataaactgaagcggaaaaaactggaaaataaacacaagaaggatgaggagaaaaacaagatccgggaagagtggaacaatttttcttacttccctgaaatcactcacattgtaataaaggagtctgtggtcagcattaacaagcaggacaacaagaaaatggaactgaagctctcttcccacgaggaggccttgtcctttgtgtccctggtagatggctacttccggctcacagcagatgcccatcattacctctgcaccgacgtggcccccccgttgatcgtccacaacatacagaatggctgtcatggtccaatctgtacagaatacgccatcaataaattgcggcaagaaggaagcgaggaggggatgtacgtgctgaggtggagctgcaccgactttgacaacatcctcatgaccgtcacctgctttgagaagtctgagcaggtgcagggtgcccagaagcagttcaagaactttcagatcgaggtgcagaagggccgctacagtctgcacggttcggaccgcagcttccccagcttgggagacctcatgagccacctcaagaagcagatcctgcgcacggataacatcagcttcatgctaaaacgctgctgccagcccaagccccgagaaatctccaacctgctggtggctactaagaaagcccaggagtggcagcccgtctaccccatgagccagctgagtttcgatcggatcctcaagaaggatctggtgcagggcgagcaccttgggagaggcacgagaacacacatctattctgggaccctgatggattacaaggatgacgaaggaacttctgaagagaagaagataaaagtgatcctcaaagtcttagaccccagccacagggatatttccctggccttcttcgaggcagccagcatgatgagacaggtctcccacaaacacatcgtgtacctctatggcgtctgtgtccgcgacgtggagaatatcatggtggaagagtttgtggaagggggtcctctggatctcttcatgcaccggaaaagcgatgtccttaccacaccatggaaattcaaagttgccaaacagctggccagtgccctgagctacttggaggataaagacctggtccatggaaatgtgtgtactaaaaacctcctcctggcccgtgagggcatcgacagtgagtgtggcccattcatcaagctcagtgaccccggcatccccattacggtgctgtctaggcaagaatgcattgaacgaatcccatggattgctcctgagtgtgttgaggactccaagaacctgagtgtggctgctgacaagtggagctttggaaccacgctctgggaaatctgctacaatggcgagatccccttgaaagacaagacgctgattgagaaagagagattctatgaaagccggtgcaggccagtgacaccatcatgtaaggagctggctgacctcatgacccgctgcatgaactatgaccccaatcagaggcctttcttccgagccatcatgagagacattaataagcttgaagagcagaatccagatattgtttcagaaaaaaaaccagcaactgaagtggaccccacacattttgaaaagcgcttcctaaagaggatccgtgacttgggagagggccactttgggaaggttgagctctgcaggtatgaccccgaaggggacaatacaggggagcaggtggctgttaaatctctgaagcctgagagtggaggtaaccacatagctgatctgaaaaaggaaatcgagatcttaaggaacctctatcatgagaacattgtgaagtacaaaggaatctgcacagaagacggaggaaatggtattaagctcatcatggaatttctgccttcgggaagccttaaggaatatcttccaaagaataagaacaaaataaacctcaaacagcagctaaaatatgccgttcagatttgtaaggggatggactatttgggttctcggcaatacgttcaccgggacttggcagcaagaaatgtccttgttgagagtgaacaccaagtgaaaattggagacttcggtttaaccaaagcaattgaaaccgataaggagtattacaccgtcaaggatgaccgggacagccctgtgttttggtatgctccagaatgtttaatgcaatctaaattttatattgcctctgacgtctggtcttttggagtcactctgcatgagctgctgacttactgtgattcagattctagtcccatggctttgttcctgaaaatgataggcccaacccatggccagatgacagtcacaagacttgtgaatacgttaaaagaaggaaaacgcctgccgtgcccacctaactgtccagatgaggtttatcaacttatgaggaaatgctgggaattccaaccatccaatcggacaagctttcagaaccttattgaaggatttgaagcacttttaaaataagaagcatgaataacatttaaattccacagattatcaagtccttctcctgcaacaaatgcccaagtcattttttaaaaatttctaatgaaagaagtttgtgttctgtccaaaaagtcactgaactcatacttcagtacatatacatgtataaggcacactgtagtgcttaatatgtgtaaggacttcctctttaaatttggtaccagtaacttagtgacacataatgacaaccaaaatatttgaaagcacttaagcactcctccttgtggaaagaatataccaccatttcatctggctagttcaccatcacaactgcattaccaaaaggggatttttgaaaacgaggagttgaccaaaataatatctgaagatgattgcttttccctgctgccagctgatctgaaatgttttgctggcacattaatcatagataaagaaagattgatggacttagccctcaaatttcagtatctatacagtactagaccatgcattcttaaaatattagataccaggtagtatatattgtttctgtacaaaaatgactgtattctctcaccagtaggacttaaactttgtttctccagtggcttagctcctgttcctttgggtgatcactagcacccatttttgagaaagctggttctacatggggggatagctgtggaatagataatttgctgcatgttaattctcaagaactaagcctgtgccagtgctttcctaagcagtatacctttaatcagaactcattcccagaacctggatgctattacacatgcttttaagaaacgtcaatgtatatccttttataactctaccactttggggcaagctattccagcactggttttgaatgctgtatgcaaccagtctgaataccacatacgctgcactgttcttagagggtttccatacttaccaccgatctacaagggttgatccctgtttttaccatcaatcatcaccctgtggtgcaacacttgaaagacccggctagaggcactatggacttcaggatccactagacagttttcagtttgcttggaggtagctgggtaatcaaaaatgtttagtcattgattcaatgtgaacgattacggtctttatgaccaagagtctgaaaatctttttgttatgctgtttagtattcgtttgatattgttacttttcacctgttgagcccaaattcaggattggttcagtggcagcaatgaagttgccatttaaatttgttcatagcctacatcaccaaggtctctgtgtcaaacctgtggccactctatatgcactttgtttactctttatacaaataaatatactaaagactttacatgca

SEQ ID NO: 34 - DNA, 4006 bp, Homo sapiens
ccgattcctggcttttgcaaggctgtggtcggtggtcatcagtgctcttgacccaggtccagcgagccttttccctggtgttgcagctgttgttgtaccgccgccgtcgccgccgtcgccgcctgctctgcggggtcatggtgtgcttccgcctcttcccggttccgggctcagggctcgttctggtctgcctagtcctgggagctgtgcggtcttatgcattggaacttaatttgacagattcagaaaatgccacttgcctttatgcaaaatggcagatgaatttcacagtacgctatgaaactacaaataaaacttataaaactgtaaccatttcagaccatggcactgtgacatataatggaagcatttgtggggatgatcagaatggtcccaaaatagcagtgcagttcggacctggcttttcctggattgcgaattttaccaaggcagcatctacttattcaattgacagcgtctcattttcctacaacactggtgataacacaacatttcctgatgctgaagataaaggaattcttactgttgatgaacttttggccatcagaattccattgaatgacctttttagatgcaatagtttatcaactttggaaaagaatgatgttgtccaacactactgggatgttcttgtacaagcttttgtccaaaatggcacagtgagcacaaatgagttcctgtgtgataaagacaaaacttcaacagtggcacccaccatacacaccactgtgccatctcctactacaacacctactccaaaggaaaaaccagaagctggaacctattcagttaataatggcaatgatacttgtctgctggctaccatggggctgcagctgaacatcactcaggataaggttgcttcagttattaacatcaaccccaatacaactcactccacaggcagctgccgttctcacactgctctacttagactcaatagcagcaccattaagtatctagactttgtctttgctgtgaaaaatgaaaaccgattttatctgaaggaagtgaacatcagcatgtatttggttaatggctccgttttcagcattgcaaataacaatctcagctactgggatgcccccctgggaagttcttatatgtgcaacaaagagcagactgtttcagtgtctggagcatttcagataaatacctttgatctaagggttcagcctttcaatgtgacacaaggaaagtattctacagcccaagagtgttcgctggatgatgacaccattctaatcccaattatagttggtgctggtctttcaggcttgattatcgttatagtgattgcttacgtaattggcagaagaaaaagttatgctggatatcagactctgtaacactaatcaatacgtgatctctgttacaaaagaaaaaagcaagtacaagttccaacatgcaatactggtcaacttaaggtatatttagttgcagtccagctctttagaatgggtggtatgggggatttcaaacttaaacaaaaaactatcaactacaaattagttgcctgactttggtttttccaaccaaggaatttaaaactgttatttttacagcaaaagatgtgcaaaatcactggattataagttctattttactgtcttgaattagtatttcagtgttttcattttagacattcagactaaaaatacaccgtttagaaaaaacaatttttgaaaaagagattttttttccctgcaggtagttgagttgaacaacatgttctaccgtggatttgtacttgctccttttgctctttttgtgtgtgtgtgtgtgtgtgtgtgtgtgtgtgtgatttttgtttgcaggttaacttagctactttggcattgctgcatatttgacctttgagagatataatagtagatttgaacaggggctggtattattatgttcttagcaataaatgcttttctaatgccttttgaatacatttgtatttatgtggctgtaatgacaaaagatacaaaagctttttaaaatttagagtaggtattaatcttattgtttaatcttttttttaaaaaaactggatatttcaatcttttaaattgcaatatataagactattccaactgggcatttcaatccattttttaggtgctttagagataattgcttgccagtgccaattgagggcattagtactttgtgctcataaattggcctctgtatgcagtactaaaattaatgcagatttctctttagccttccaacatttcttgttgatagtgatgtattttattattttctttttcttaagaaatgccagtgtgtcctagaacctagataacgaagtgcacttacacttataaaataacttgcatctaggctgggcgtggcggctcacgcctgtaatcccagcactttgggaggccgaagtgggtggatcacttgaggccaggagtttgagaccagcctggccaacatggtgaaaccccatctctatcagaaatacaaaaaattagctgggcatggtggtgggcgcctgtaatcccagttactcgggaggctgaggcaggagaatcacttgaacccgggaggcagaggttgcggtgagccaagagcgcaccattgcactccagccttgggcgacaaaaacgaaactccatcttcaaaacaaaacaaaacaaaacaaacaaacaaacaaaacttgcatcttaaccaaaagtcttggttttatcttaatccattaaaagttggtcttgtttccagcttgcattgattgctacaacatcactaatttggctttcacatttaaatggttctgtgctaatcaaaactttcgttgttattattcgttatggtagaatcatttttaattcacgtgctttgtgttcagttttgtggtctgagagatgtaccaattgtcaaattaccgtgtaccacctaatgtttataggagaaagcaaaatacatcagcttggtagttaacacatcaaatatttcttgctgcttctaggagaacttttttggtgtgtgttggaatggctgagcaaatattaaaattgttaatatgcagccatatatggaaggttcctgtggggttgttttttcgtgttttttttttttgtggtgggattatgtgcctcccattcactagaaaatgagaaaattgtctgggttccaaaatattgacattgaatggatcaatacacacacacagacatatatatatatatatgcacacatatataggcagttgcatgcctagcatgggtattttataaccatataactgagttatattggaattataaatattttccgtcacttaaatttgttctttgtttagcctgaaaacctttatggctcaagatcagattcctgactaacccctctcttagagctacagcgagctgcattaccagcttaaaacacttcttagggattaaatatagatgtaatttttcaaaatcgtttttaatttaaactgtgttttagtgtaaaattgttaaccttgtaagatggataatgtgtataagaatgtaggccttaactatttcacatgagtcaaaacaaagcagctttaaaaaaataattggaagcacaatgcatggcactgactgaatgctgttaatatttctaaaagtttctacattcagattatatgcctgattcatagtaaaatacctctaataaacactgttttatagaaaacctgacttcagtgaatatttttgtattttacatgggccagtttatatactgctatttacactattatttcctatagctacatgttctttgtaccttttgtagttttatttgtattactagattcataccttgatggtaacgctctatctggttttgggtgtttttcatgttttagcatttgtataaagaaactggtccatgtaaatactttccatgttttttcttcaaatgtttaaaccactagttgatgtatggtatctttagatatttgcctgtctgtttgctcaaaattgcttctaaaacaataaagattctt

SEQ ID NO: 35 - DNA, 3723 bp, Homo sapiens
tttttctttcctggctgatgatttgtcattctagtcacttcctgccttgtgaccacacacccaggcttgacaaagctgttctgcagatcagaaagaaggggttcctggtcatacaccagtactaccaaggacagcttttttcctgcaagatctgttacctaaagcaataaaaaatggccagaggatcagtgtccgatgaggaaatgatggagctcagagaagcttttgccaaagttgatactgatggcaatggatacatcagcttcaatgagttgaatgacttgttcaaggctgcttgcttgcctttgcctgggtatagagtacgagaaattacagaaaacctgatggctacaggtgatctggaccaagatggaaggatcagctttgatgagtttatcaagattttccatggcctaaaaagcacagatgttgccaagacctttagaaaagcaatcaataagaaggaagggatttgtgcaatcggtggtacttcagagcagtctagcgttggcacccaacactcctattcagaggaagaaaagtatgcctttgtcaactggataaacaaagccctggaaaatgatcctgattgtcggcatgtcatcccaatgaacccaaacacgaatgatctctttaatgctgttggagatggcattgtcctttgtaaaatgatcaacctgtcagtgccagacacaattgatgaaagaacaatcaacaaaaagaagctaacccctttcaccattcaggaaaatctgaacttggctctgaactctgcctcagccatcgggtgccatgtggtcaacataggggctgaggacctgaaggaggggaagccttatctggtcctgggacttctgtggcaagtcatcaagattgggttgtttgctgacattgaactcagcagaaatgaagctctgattgctcttttgagagaaggtgagagcctggaggatttgatgaaactctcccctgaagagctcttgctgaggtgggctaattaccacctggaaaatgcaggctgcaacaaaattggcaacttcagtactgacatcaaggactcaaaagcttattaccacctgcttgagcaggtggctccaaaaggagatgaagaaggtgttcctgctgttgttattgacatgtcaggactgcgggagaaggatgacatccagagggcagaatgcatgctgcagcaggcggagaggctgggctgccggcagtttgtcacagccacagatgttgtccgagggaaccccaagttgaacttggcttttattgccaacctctttaacagataccctgccctgcacaaaccagagaaccaggacattgactggggggctcttgaaggtgagacgagagaagagcggacatttaggaactggatgaactccctgggtgttaaccctcgagtcaatcatttgtacagtgacttatcagatgccctggtcatcttccagctctatgaaaagatcaaagttcctgttgactggaacagagtaaacaaaccgccataccccaaactgggaggcaatatgaagaagcttgagaattgtaactacgcggtagaattggggaagaatcaagcgaagttctccctggttggcatcggtggacaagatctcaatgaaggaaaccgcactctcacactggccttgatttggcagctaatgagaaggtatacactgaatatcctcgaagaaattggtggtggccagaaggtcaatgatgacattattgtcaactgggtgaatgaaacattgagggaagcagagaaaagttcatccatctctagtttcaaggacccgaagattagtacaagtctgcctgttctggacctcatcgatgccatccaaccaggttccattaactatgaccttctgaagacagaaaatctgaatgatgatgagaaactcaacaatgcaaaatatgccatctctatggcccgaaaaattggagcaagagtgtatgccctgccagaagacctggttgaagtgaaccccaaaatggtcatgaccgtgtttgcctgcctcatggggaaaggaatgaagagggtgtgaggccaatggggctgggtgggaggcggtgcactcactcctgactgcccggcacagatgctccagggatgattcaagccattccaaagttcaacttggtgacactctataagattccaaaaagcacatattagtgcagccaagtagcctctcctgtatttaacaaaaagtgcttcattctttgcaggaggcccaacctcctatatataggtttctattcttgatttatttgcttcttcgaaaatctagaggaaaagaaagaagttattttccaggtacccttctcgcttttgccattagccaaggatagaagctgcagtggtattaattttgatataatctttcaaaccagcttgttgtggcttcccttttctttgttcaagatgagggccaggaggggaaacatcacacctgccctaaaccctgttcctggaggtcagcatttgatctgttgcaagcccctctttctgtcccctcttcctaccctgcctcccatgactttgctcctcacacttttggaaccatgccttccgggggggcccatctcttctggcggtccttgtctctgggccacttggagtgtgtgataaatcagtcaagctgttgaagtctcaggagtctctggtagcctgcagaagtaagcctcatcatcagagcctttcctcaaaactggagtcccaaatgtcatcaggttttgttttttttcagccactaagaacccctctgcttttaactctagaatttgggcttggaccagatctaacatcttgaatactctgccctctagagccttcagccttaatggaaggttggatccaaggaggtgtaatggaatcggaatcaagccactcggcaggcatggagctataactaagcatccttagggttctgcctctccaggcattagccctcacattagatctagttactgtggtatggctaatacctgtcaacatttggaggcaatcctaccttgcttttgcttctagagcttagcatatctgattgttgtcaggccatattatcaatgtttacttttttggtactataaaagctttctgccacccctaaactccaggggggacaatatgtgccaatcaatagcacccctactcacatacacacacacctagccagctgtcaagggcagaatgaatctatgctggataagaaatggtggaactgcgttatgaagagctaatttactggacaaagaattccaaagcaaaaccagaacagtatgaatttgagcaggtctcataggttgagcaatttccccctaaaccaactgaaggctaaaaagcaacaggccattgtgaaccaatgcaagacgccctctatcatggtgaaaagctccatcaatgaggtatcttctttagtggtggtatgtaatggaacttagccatttttcaaagcaattgaaatgcattgctctggatctgttccttggcagtggactcagaaagccaacatgtggctcctcccagcccataaccagtatttttgctgcttctgaatacaaattggttggttttgacttcagattgaacttactgtagcctcagatgatttcccccctccgcctcccaggaagaaagaatgttactgccttaataaaaaatgaaaagagaatgatgctcaaaatctttccaaataaaatgttccctat

SEQ ID NO: 36 - DNA, 5304 bp, Homo sapiens
gcggaggctgggcgggagctacgccggcccaagccccgccggggaccagcgagccgggaggaggagcaggcgccacagccgccccgcgccccgcgcccgcttgtaatccggtccgctccttattcagccgccgggaactgcgaggaggcgtcatgtagcagcagcagcaaatccgcctcgcatttgcaactcttttttttttttttggtggggcggggggcgcgcggcaaaattctgtctccgcccccccttttcttgcccacttccatttgcaagctgcatctgcctctctaaaaaaattgaggagttcggggaagggcagggggccataaatcagagttggacctgcaataacccccacacctacagggcaaccatgaccgaggagagctctgacgttcccagggagttgatagaaagcataaaggatgttattggcagaaagataaaaatttcagtgaagaagaaagtaaagttggaagttaagggagacaaagttgaaaacaaagtgctggtccttacatcatgccgagccttccttgtaacagcgcgaatccccaccaagctcgagttaaccttcagctacttggagattcatggcgtcgtttgcagcaagtcagctcagatgattgtggaaactgagaagtgcagcatttccatgaagatggcgtcacccgaggacgtgagtgaggtgctggctcacataggcacctgcctgaggaagatatttcctggcctctctccagtgagaatcatgaaaaaagtctccatggagccatctgagcgcctggctagtctccaggcgctgtgggacagccagaccgtggctgagcagggcccctgtggtggattttctcagatgtatgcctgtgtttgtgactggcttggattttcatacagggaagaagtacaatgggatgtggatacaatttatcttacccaagacaccagggaattgaatttacaagattttagtcatcttgaccacagggacctaatacctatcattgctgctctggaatataatcagtggttcacaaaactgtcctctaaggatctaaaactgtccactgatgtctgtgaacagatcttgagggtggtgagtaggtccaatcgactggaagaattggtgttggaaaatgctggacttagaacagattttgcacaaaaactggccagtgctctagcacataatcccaactcaggactccacacaattaaccttgctggcaacccactggaggatagaggtgtgtcctctttaagtattcaatttgccaaactcccaaagggattaaagcacttaaatttatctaaaacctcattatcacctaaaggggtgaacagcctttctcagtcactcagtgccaatccattgaccgcctctacccttgtccacctcgacctctcagggaacgtccttcgtggagatgacctctcacacatgtataattttttggcccagccaaatgccattgttcatctggatttatccaatacagaatgttccctggacatggtctgtggagctcttctccgtggatgccttcaatatttagctgtgctcaacctctccagaactgtcttctctcaccggaaaggaaaagaagtacctccatctttcaagcaattttttagtagttctctggctttgatgcacatcaacctttcaggcacaaaactgtctcctgagcccttaaaagcactgttattgggcctggcttgtaatcataacttgaaaggggtttctctggatctcagcaactgtgagctgagatcaggaggtgctcaagtattagaaggttgcattgctgaaatacacaacatcaccagcttagacatctctgacaatggtttagaatctgacctatctaccttaatagtgtggctcagtaaaaacagatcaatacaacacctggcgttaggcaaaaattttaataatatgaaatccaaaaatctgacacctgtattggacaacttagtacagatgattcaagatgaagaatcacctctgcagtccttgtccctggctgactcgaaactcaagactgaggtcaccatcatcatcaatgccctgggaagcaacacctccctgaccaaagtggacattagcggcaacggaatgggggacatgggagcgaagatgctggccaaagcactgcagatcaacactaagctcaggactgtaatatgggacaagaacaacatcactgcacaaggctttcaggatatagctgttgctatggaaaagaactacacattaagatttatgccaattcctatgtatgatgcttctcaagccctaaaaacaaaccctgaaaaaacagaagacgctctgcaaaagatagaaaactacctgctacgaaatcacgagactagaaaataccttcaagagcaggcctaccgcctgcagcagggtattgtcaccagcaccacccagcagatgattgacagaatatgtgtgaaagtacaagatcatctcaactccttacgaaattgtgggggagacgctatccaggaagatttaaaatcagcagagcggctcatgcgtgatgctaagaactctaaaacgttgttaccaaatttataccatgttggtggtgcatcttgggcgggagccagtggcttactatccagtccaattcaggagaccctggaatcaatggctggagaagttacaagagtagtagatgaacaactaaaggcgttgcttgagtccatggttgatgctgctgagaatctttgtcccaatgtgatgaaaaaagcccacattcgacaagacttgattcatgccagcaccgaaaagatttctattccacgtacctttgttaaaaatgtcctgttggagcagtctggaattgatatccttaacaaaattagtgaagtaaaattgacagtggcctcgttcctgtctgatagaattgtggatgaaatcctggatgcactctcacattgccatcataaactggctgaccatttcagcagacgtggcaagacccttcctcaacaagaatccttagagatcgagctggctgaggagaagccagttaaacgttccatcatcacagtggaggagctaacagagatagagcgtttggaagatctggatacctgtatgatgacccctaaatccaaaaggaagagtatccatagccgaatgctgcggcctgtttctagggcttttgaaatggagtttgatctagataaagcgctggaagaggtaccaattcacatcgaagacccgcccttcccatccctcagacaggagaagcggagctcgggatttatctctgagttgccctctgaagaggggaagaagctggaacactttaccaagttaaggccaaaaaggaataagaagcagcaacccacccaagcagcggtctgtgctgccaacatagtctcacaagatggtgaacagaatggtctcatggggagagtggatgaaggtgtagatgaattttttaccaagaaggtgaccaaaatggattccaagaaatggtcaacaagaggctcagagtcccatgagcttaatgaaggaggagatgaaaagaaaaagcgagattctcggaaaagtagtggctttctcaatttaatcaaatcccggtccaaatccgagcgaccaccaacgatcttgatgacagaagaaccctcctcaccaaaaggggcagtcagaagtccacctgtggactgtcccaggaaggacacaaaggccgccgagcacaatggcaattctgaacggatagaggagataaaaacacctgactcctttgaagagagtcaaggggaagaaatagggaaggtggaacggagtgacagcaagagcagcccacaggcagggcggaggtatggggtccaggtgatgggcagtggtctgctggcagagatgaaagccaagcaagagaaccgctttggtttgggaacaccagaaaagaataccaaagcagaacccaaagcggaagcaggctccaggtctcggagctcatccagcacacctacgagcccgaagcccctcctgcagtcccccaaacccagtctggcagcacggcccgtcatcccgcagaaaccaagaaccgcctcacggcctgatgacattccagactctccatctagcccgaaagttgcccttcttccacctgtcctgaaaaaagttccttcagacaaagagagagatggccagagtagcccccagcccagccccaggacattttcacaggaagtttcaaggagaagctggggccagcaggcccaggagtatcaagaacaaaagcaacggtcctccagtaaagatggccatcaaggcagcaaatctaatgactccggggaagaagcagaaaaagagtttatttttgtgtaaaggtcacccacgcagaagtcttcctgtgcagggtgctttggtagccatcagagaggaaccaagggcaacatcttttcttcccaggcgttcttctctgggtgctttattctcttctttttctttatttcgcccccacccccatcccctgccttttttttttttttttttttttttttttgtatagaaacagatccatttcttggtaatcaaagcacatttgtttggtcttcctccaaccctttgcatttgatttctaaacattccttcatatgcctttaatgaaagccagcaattatcccatgggccctacttgaatttatctgaggcagctacagattgccctgcaagatgagtttttggagataaatgaaataactggacacacactcacacaagtaacaccacagcagacctcggagtactgctaagtgtacctgtgtcaaatccgcacaggactcaatatagcaatttattcttgatgtatgcaattgcacattgtaattatattaacagagcacactaataatttgtatagattatatatattagatcttgggtatggtttttaccttctcccatggggaacttcttccttcctgatgtggaattgtacatttaaagcttggtcggtgacctttgcataccatcaacgagcacagctaagaacagagtgagagaggcccatggctgattttaccatgtgcccagattaatgtatatagttgattggaatgaggttttatgaatattcatgtttttgaaggcctttaatttctgtctgcatattagcttttaatgtgtgattttaagagagaatactttgacacctgtaaaaatcaaaatactactctttataagacatttcacaaatattcacttacattacaggctggaagtattttattcatatgtatatttataccaataaaatgattttacaagtggaa

SEQ ID NO: 37 - DNA, 2551 bp, Homo sapiens
atcagcccaaaggtaggctcaggctccgacggtggccggcgggggtcacgaggcttcgtagtggaggaacgggtttggcgtgtgggacgcagctgcctctgtactggggagtcacggagtggccgggctccagggacatggcggcggcctctgcggtgtcggtgctgctggtggcggcggagaggaaccggtggcatcgtctcccgagcctgctcctgccgccgaggacatgggtgtggaggcaaagaaccatgaagtacacaacagccacaggaagaaacattaccaaggtcctcattgcaaacagaggagaaattgcctgcagggtgatgcgcacagccaaaaaactgggtgtacagactgtggcggtttatagtgaggctgacagaaattccatgcatgtagatatggcagatgaagcatattccatcggccccgctccctcccagcagagctacctatctatggagaaaatcattcaagtggccaagacctctgctgcacaggctatccatccaggatgcggttttctctcagaaaacatggaatttgctgaactttgtaagcaagaaggaattatttttataggccctcctccatctgcaattagagacatgggtataaagagcacatccaaatccataatggctgctgctggagtacctgttgtggagggttatcatggtgaggaccaatcagaccagtgcctgaaggaacacgccaggagaattggctatcctgtcatgattaaagccgtccggggtggaggaggaaaaggaatgaggattgttagatcagaacaagaatttcaagaacagttagagtcagcacggagagaagctaagaagtctttcaatgatgatgctatgctgatcgagaagtttgtagacacaccgaggcatgtagaagtccaggtgtttggtgatcaccatggcaatgctgtgtacttgtttgaaagagactgtagtgtgcagaggcgacatcagaagatcattgaggaggccccagcgcctggtattaaatctgaagtaagaaaaaagctgggagaagctgcagtcagagctgctaaagctgtaaattatgttggagcagggactgtggagtttattatggactcaaaacataatttctgtttcatggagatgaatacaaggctgcaagtggaacatcctgttactgagatgatcacaggaactgacttggtggagtggcagcttagaattgcagcaggagagaagattcctttgagccaggaagaaataactctgcagggccatgccttcgaagctagaatatatgcagaagatcctagcaataacttcatgcctgtggcaggcccattagtgcacctctctactcctcgagcagacccttccaccaggattgaaactggagtacggcaaggagacgaagtttccgtgcattatgaccccatgattgcgaagctggtcgtgtgggcagcagatcgccaggcggcattgacaaaactgaggtacagccttcgtcagtacaatattgttggactgcacaccaacattgacttcttactcaacctgtctggccacccagagtttgaagctgggaacgtgcacactgatttcatccctcaacaccacaaacagttgttgctcagtcggaaggctgcagccaaagagtctttatgccaggcagccctgggtctcatcctcaaggagaaagccatgaccgacactttcactcttcaggcacatgatcaattctctccattttcgtctagcagtggaagaagactgaatatctcgtataccagaaacatgactcttaaagatggtaaaaacaatgtagccatagctgtaacgtataaccatgatgggtcttatagcatgcagattgaagataaaactttccaagtccttggtaatctttacagcgagggagactgcacttacctgaaatgttctgttaatggagttgctagtaaagcgaagctgattatcctggaaaacactatttacctattttccaaggaaggaagtattgagattgacattccagtccccaaatacttatcttctgtgagctcacaagaaactcagggcggccccttagctcctatgactggaaccattgaaaaggtgtttgtcaaagctggagacaaagtgaaagcgggagattccctcatggttatgatcgccatgaagatggagcataccataaagtctccaaaggatggcacagtaaagaaagtgttctacagagaaggtgctcaggccaacagacacactcctttagtcgagtttgaggaggaagaatcagacaaaagggaatcggaataaactccagcaaggaaatggccagttaagtagtgtcttctctctccaccaaaaagaggaagtgcctccagcttttctgggggtctcataaagagcagttttactaaatgattgtatgcttatgctgaacacctttcatattggagaatcatgcatttgggtcactaattatctcaaaatatttcatactaataaagttgaattattttttattggaagccaaaaaaaaaaaaaaaaaa

SEQ ID NO: 38 - DNA, 2329 bp, Homo sapiens
aggacctgagctcagcttccgccccagccagggaagcggcaggggaaagcaccggctccaggccagcgtgggccgctctctcgctcggtgcccgccgccatgtgggccgtcctgaggttagccctgcggccgtgtgcccgcgcctctcccgccgggccgcgcgcctatcacggggactcggtggcctcgctgggcacccagccggacttgggctctgccctctaccaggagaactacaagcagatgaaagcactagtaaatcagctccatgaacgagtggagcatataaaactaggaggtggtgagaaagcccgagcacttcacatatcaagaggaaaactattgcccagagaaagaattgacaatctcatagacccagggtctccatttctggaattatcccagtttgcaggttaccagttatatgacaatgaggaggtgccaggaggtggcattattacaggcattggaagagtatcaggagtagaatgcatgattattgccaatgatgccaccgtcaaaggaggtgcctactacccagtgactgtgaaaaaacaattacgggcccaagaaattgccatgcaaaacaggctcccctgcatctacttagttgattcgggaggagcatacttacctcgacaagcagatgtgtttccagatcgagaccactttggccgtacattctataatcaggcaattatgtcttctaaaaatattgcacagatcgcagtggtcatgggctcctgcaccgcaggaggagcctatgtgcctgccatggctgatgaaaacatcattgtacgcaagcagggtaccattttcttggcaggaccccccttggttaaagcggcaactggggaagaagtatctgctgaggatcttggaggtgctgatcttcattgcagaaagtctggagtaagtgaccactgggctttggatgatcatcatgcccttcacttaactaggaaggttgtgaggaatctaaattatcagaagaaattggatgtcaccattgaaccttctgaagagcctttatttcctgctgatgaattgtatggaatagttggtgctaaccttaagaggagctttgatgtccgagaggtcattgctagaatcgtggatggaagcagattcactgagttcaaagccttttatggagacacattagttacaggatttgctcgaatatttgggtacccagtaggtatcgttggaaacaacggagttctcttttctgaatctgcaaaaaagggtactcactttgtccagttatgctgccaaagaaatattcctctgctgttccttcaaaacattactggatttatggttggtagagagtatgaagctgaaggaattgccaaggatggtgccaagatggtggccgctgtggcctgtgcccaagtgcctaagataaccctcatcattgggggctcctatggagccggaaactatgggatgtgtggcagagcgtatagcccaagatttctctacatttggccaaatgctcgtatctcagtgatgggaggagagcaggcagccaatgtgttggccacgataacaaaggaccaaagagcccgggaaggaaagcagttctccagtgctgatgaagcggctttaaaagagcccatcattaagaagtttgaagaggaaggaaacccttactattccagcgcaagggtatgggatgatgggatcattgatccagcagacaccagactggtcttgggtctcagttttagtgcagccctcaacgcaccaatagagaagactgacttcggtatcttcaggatgtaactggaataaaggatgttttctgttggacatgtactgaaaattaacacatgtagtagccttaaaattttagacttctcgaacatgaggctgttacagtaatttttttaacactgtgcattgtacttttctaccttaaaaaaatcagtgaggatatttatttaatgaacatcaattccttttaaattttcttagagaaatttctctgtggctcagttttaccacccataaagcggagacagtaatttatggttatcctttctgacccacaaagtatgaaaagttctgtaatctgtaaactcagttctgtaatctgtattattgagatgattaatataaagttgtattttcactgaaatgattgttttgctggttatgcttggtgatattttagcgggcttatttttgaaaggcatctgttacttcagttgcataaagtgccctcacactgctgtgcagccattaccaccattcatctccagaatttgttctcagtcccaaactgaaactataccattcaaacaacagcgctccccatttc

SEQ ID NO: 39 - DNA, 6579 bp, Homo sapiens
tgctgttaatcatttcagagaagaacactgaactttgaaaaaaatgttggaagccattgacaaaaatcgggccctgcatgcagcagagcgcttgcaaaccaagctgcgagaacgtggggatgtagcaaatgaagacaaactgagccttctgaagtcagtcctgcagagccctctcttcagtcagattctgagccttcagacttctgtacagcagctgaaagaccaggtaaatattgcaacttcagcaacttcaaatattgaatatgcccacgttcctcatctcagcccagctgtgattcctactctgcaaaatgaatcgtttttattatccccaaacaatgggaatctggaagcacttacaggacctggtattccacacattaatgggaaacctgcttgtgatgaatttgatcagcttatcaaaaatatggcccagggtcgccatgtagaagtttttgagctcctcaaacctccatctggaggccttgggtttagtgttgtgggactaagaagtgaaaacagaggagagctgggaatatttgttcaagagatacaagagggcagtgtggcccatagagatggaagattgaaagaaactgatcaaattcttgctatcaatggacaggctcttgatcagacaattacacatcagcaggctatcagcatcctgcagaaagccaaagatactgtccagctagttattgccagaggctcattgcctcagcttgtcagccccatagtttcccgttctccatctgcagccagcacaatttcagctcactctaatccggttcactggcaacacatggaaacgattgaattggtgaatgatggatctggtttgggatttggcatcataggaggaaaagcaactggtgtgatagtaaaaaccattctgcctggaggagtagctgatcagcatgggcgtttatgcagtggagaccacattctaaagattggtgacacagatctagcaggaatgagcagtgagcaagtagcacaagtccttaggcaatgtggaaatagagttaagttgatgattgcaagaggtgccatagaagaacgtacagcacccactgctttgggcatcaccctctcctcatccccaacttcaacaccagagttgcgggttgatgcttctactcagaaaggtgaagaaagtgagacatttgatgtagaactcactaaaaatgtccaaggattaggaattaccattgctggctacattggagataaaaaattggaaccttcaggaatctttgtaaagagcattacaaaaagcagtgccgttgagcatgatggaagaatccaaattggagaccaaattatagcagtagatggcacaaaccttcagggttttactaatcagcaagcagtagaggtattgcgacatacaggacaaactgtgctcctgacactaatgaggagaggaatgaagcaggaagccgagctcatgtcaagggaagacgtcacaaaagatgcagatttgtctcctgttaatgccagcataatcaaagaaaattatgaaaaagatgaagattttttatcttcgacgagaaacaccaacatattaccaactgaagaagaagggtatccattactgtcagctgagatagaagaaatagaagatgcacaaaaacaagaagctgctctgctgacaaaatggcaaaggattatgggaattaactatgaaatagtggtggcccatgtgagcaagtttagtgagaacagtggattggggataagcctggaagcgacagtgggacatcattttatccgatctgttctaccagagggtcctgttggacacagcgggaagctcttcagtggagacgagctattggaagtaaatggcataactttacttggggaaaatcaccaagatgtggtgaatatcttaaaagaactgcctatagaagtgacaatggtgtgctgtcgtcgaactgtgccacccaccacccaatcagaattggatagcctggacttatgtgatattgagctaacagaaaagcctcacgtagatctaggtgagttcatcgggtcatcagagacagaggatccagtgctggcgatgactgatgcgggtcagagtacagaagaggttcaagcacctttggccatgtgggaggctggcattcagcacatagagctggagaaagggagcaaaggacttggttttagcattttagattatcaggatccaattgatccagcaagcactgtgattataattcgttctttggtgcctggcggcattgctgaaaaggatggacgacttcttcctggtgaccgactcatgtttgtaaacgatgttaacttggaaaacagcagtcttgaggaagctgtagaagcactgaagggagcaccgtcagggactgtgagaataggagttgctaagcctttacccctttcaccagaagaaggttatgtttctgctaaggaggattcctttctctacccaccacactcctgtgaggaagcagggctggctgacaaacccctcttcagggctgacttggctctggtgggcacaaatgatgctgacttagtagatgaatccacatttgagtctccatactctcctgaaaatgacagcatctactctactcaagcctctattttatctcttcatggcagttcttgtggtgatggcctgaactatggttcttcccttccatcatctcctcctaaggatgttattgaaaattcttgtgatccagtacttgatctgcatatgtctctggaggaactatatacccagaatctcctgcaaagacaggatgagaatacaccttcggtggacataagtatggggcctgcttctggctttactataaatgactacacacctgcaaatgctattgaacaacaatatgaatgtgaaaacacaatagtgtggactgaatctcatttaccaagtgaagttatatcaagtgcagaacttccttctgtgctacccgattcagctggaaagggctctgagtacctgcttgaacagagctccctggcctgtaatgctgagtgtgtcatgcttcaaaatgtatctaaagaatcttttgaaaggactattaatatagcaaaaggcaattctagcctaggaatgacagttagtgctaataaagatggcttggggatgatcgttcgaagcattattcatggaggtgccattagtcgagatggccggattgccattggggactgcatcttgtccattaatgaagagtctaccatcagtgtaaccaatgcccaggcacgagctatgttgagaagacattctctcattggccctgacataaaaattacttatgtgcctgcagaacatttggaagagttcaaaataagcttgggacaacaatctggaagagtaatggcactggatattttttcttcatacactggcagagacattccagaattaccagagcgagaagagggagagggtgaagaaagcgaacttcaaaacacagcatatagcaattggaatcagcccaggcgggtggaactctggagagaaccaagcaaatccttaggcatcagcattgttggtggacgagggatggggagtcggctaagcaatggagaagtgatgaggggcattttcatcaaacatgttctggaagatagtccagctggcaaaaatggaaccttgaaacctggagatagaatcgtagaggtggatggaatggacctcagagatgcaagccatgaacaagctgtggaagccattcggaaagcaggcaaccctgtagtctttatggtacagagcattataaacagaccaaggaaatcccctttgccttccttgctgcacaacctttaccctaagtacaacttcagcagcactaacccatttgctgactctctacaaatcaacgccgacaaggcacccagtcagtcagagtcagagccagagaaggctccattgtgcagtgtgcccccaccccctccttcagcctttgccgaaatgggtagtgatcacacacagtcatctgcaagcaaaatctcacaagatgtggacaaagaggatgagtttggttacagctggaaaaatatcagagagcgttatggaaccctaacaggcgagctgcatatgattgaactggagaaaggtcatagtggtttgggcctaagtcttgctgggaacaaagaccgatccaggatgagtgtcttcatagtggggattgatccaaatggagctgcaggaaaagatggtcgattgcaaattgcagatgagcttctagagatcaatggtcagattttatatggaagaagtcatcagaatgcctcatcaatcattaaatgtgccccttctaaagtgaaaataatttttatcagaaataaagatgcagtgaatcagatggccgtatgtcctggaaatgcagtagaacctttgccttctaactcagaaaatcttcaaaataaggagacagagccaactgttactacttctgatgcagctgtggacctcagttcatttaaaaatgtgcaacatctggagcttcccaaggatcaggggggtttgggtattgctatcagcgaagaagatacactcagtggagtcatcataaagagcttaacagagcatggggtagcagccacggatggacgactcaaagtcggagatcagatactggctgtagatgatgaaattgttgttggttaccctattgaaaagtttattagccttctgaagacagcaaagatgacagtaaaacttaccatccatgctgagaatccagattcccaggctgttccttcagcagctggtgcagccagtggagaaaaaaagaacagctcccagtctctgatggtcccacagtctggctccccagaaccggagtccatccgaaatacaagcagatcatcaacaccagcaatttttgcttctgatcctgcaacctgccccattatccctggctgcgaaacaaccatcgagatttccaaagggcgaacagggctgggcctgagcatcgttgggggttcagacacgctgctgggtgccattattatccatgaagtttatgaagaaggagcagcatgtaaagatggaagactctgggctggagatcagatcttagaggtgaatggaattgacttgagaaaggccacacatgatgaagcaatcaatgtcctgagacagacgccacagagagtgcgcctgacactctacagagatgaggccccatacaaagaggaggaagtgtgtgacaccctcactattgagctgcagaagaagccgggaaaaggcctaggattaagtattgttggtaaaagaaacgatactggagtatttgtgtcagacattgtcaaaggaggaattgcagatgccgatggaagactgatgcagggagaccagatattaatggtgaatggggaagacgttcgtaatgccacccaagaagcggttgccgctttgctaaagtgttccctaggcacagtaaccttggaagttggaagaatcaaagctggatccagtacatctgagtcactggaaagtagctcaaagaagaatgcattggcatctgaaatacagggattaagaacagtcgaaatgaaaaagggccctactgactcactgggaatcagcatcgctggaggagtaggcagcccacttggtgatgtgcctatatttattgcaatgatgcacccaactggagttgcagcacagacccaaaaactcagagttggggataggattgtcaccatctgtggcacatccactgagggcatgactcacacccaagcagttaacctactgaaaaatgcatctggctccattgaaatgcaggtggttgctggaggagacgtgagtgtggtcacaggtcatcagcaggagcctgcaagttccagtctttctttcactgggctgacgtcaagcagtatatttcaggatgatttaggacctcctcaatgtaagtctattacactagagcgaggaccagatggcttaggcttcagtatagttggaggatatggcagccctcatggagacttacccatttatgttaaaacagtgtttgcaaagggagcagcctctgaagacggacgtctgaaaaggggcgatcagatcattgctgtcaatgggcagagtctagaaggagtcacccatgaagaagctgttgccatccttaaacggacaaaaggcactgtcactttgatggttctctcttgaattggctgccagaattgaaccaacccaacccctagctcacctcctactgtaaagagaatgcactggtcctgacaatttttatgctgtgttcagccgggtcttcaaaactgtaggggggaaataacacttaagtttctttttctcatctagaaatgctttccttactgacaacctaacatcatttttcttttcttcttgcattttgtgaacttaaagagaaggaatatttgtgtaggtgaatctcgtttttatttgtggagatatctaatgttttgtagtcacatgggcaagaattattacatgctaagctggttagtataaagaaagataattctaaagctaaccaaagaaaatggcttcagtaagttaggatgaaaaatgaaaatataaaaaaaaaaaaaaaaaaa

SEQ ID NO: 40 - DNA, 2674 bp, Homo sapiens
gacggctgtagcacaaggatctgcatctccaatggatactgaggggtttggtgagctccttcagcaagctgaacagcttgctgctgagactgagggcatctcagagcttccccatgtggaacggaacttacaggagatccagcaggcgggagagcgcctgcgttcccgtaccctaacacgcacgtcccaggagacggcagatgtcaaggcgtcagttctcctcgggtctcggggacttgacatatcccacatctcccagcgattggagagtctgagtgcagccaccacctttgagcctcttgagcctgtgaaggacactgacattcagggcttcctgaagaatgagaaggacaatgccctgctgtctgccatcgaagagtcccggaagaggaccttcggcatggctgaggagtaccatcgggagtcaatgttggttgagtgggagcaagtgaaacagcgaattctgcacacactgctggcatcaggagaagacgcccttgactttactcaagaaagcgagccaagctacatcagtgatgtgggaccccctggtcgaagctctctggataacatcgagatggcctatgcgcggcaaatttatatctataatgagaaaattgtaaatggacacctgcagcctaacctggtggacctttgtgcttccgtcgcagagctcgatgataagagcatttccgacatgtggaccatggtaaaacaaatgacagacgtgttgttgacaccggcaacggatgccctgaagaaccgcagcagcgtggaagtgcgcatggagtttgtcaggcaggccttggcgtaccttgagcagagttataagaattacacccttgtgactgtctttggaaatttgcatcaggcccagctgggcggggtgcctgggacttaccaattggttcgaagtttcctgaacattaaactgccagctcccttgcctggactacaggatggagaggtggaaggccatcctgtgtgggcgctaatttactactgcatgcgctgtggagacctgcttgccgcttcacaggtagttaatcgagcccagcaccagctgggagagtttaaaacctggttccaggagtacatgaacagcaaggacagaagattgtccccagctacggaaaacaagctccggctgcattaccgtagggccctcaggaacaatacagatccctacaagcgggccgtgtactgtatcattggcagatgtgacgtcaccgacaaccagagtgaagtggcggacaaaactgaggattacctgtggctgaagttgaaccaagtgtgttttgacgacgatggcaccagctccccacaagacaggctcactctctcacagttccagaagcagttgttggaagactatggcgagtcccactttacggtgaaccagcaacccttcctctacttccaagtcctgttcctgacagcgcagtttgaagcagcagttgcctttcttttccgcatggagcggctgcgctgccatgctgtccatgtagcactggtgctgtttgagctgaagctgcttttaaagtcctctggacagagggctcagctcctcagccacgagcctggtgaccctccttgcttgcggcggctgaacttcgtgcggctcctcatgctgtacacccggaagtttgagtccacggacccaagggaggccctccagtacttctatttcctcagggatgagaaagatagtcaaggagaaaacatgtttctgcgctgtgtgagtgagcttgtgattgaaagccgagagttcgatatgattcttgggaaactagagaatgacggaagtagaaagcctggagtcatagataagtttactagtgacacaaagcctattatcaacaaagttgcttctgtggcagaaaataaaggactgtttgaagaggcagcaaagctgtatgaccttgccaagaatgctgacaaggtactggagctgatgaacaaactgctgagccctgtcgtcccccagatcagtgccccgcaatccaacaaggagaggctgaagaacatggcactctccattgccgaacggtatagggctcaaggaataagcgcaaataaatttgtggactccacgttctatcttcttttggacttgatcaccttttttgacgagtatcatagtggtcatattgatagagcttttgatatcattgagcgcttgaagctggtgcccctgaatcaggaaagtgtggaagagagagtggctgccttcagaaatttcagtgatgaaatcaggcacaacctctcagaagtgcttcttgccaccatgaacatcttgttcacacagtttaagaggctcaaggggacaagtccatcctcgtcatccaggccccagcgagtcatcgaggaccgcgactctcaactccgaagtcaagcccgcactctgattacctttgctggaatgataccataccgaacgtctggggacaccaatgcgaggctggtgcagatggaggtcctcatgaattaagtgccatgctttgtgggagtctgggtcggcacactgtcagtacatcaggcacatgggcccactaggctggggtttctggttttgtttctgttgtgttttgttttggtttctgtattatgtatttttgtcaacgccaataaatttctttgatttgtaaaaaaaaaaaaaaaaaaaaaaaaaaaa

SEQ ID NO: 41 - DNA, 3675 bp, Homo sapiens
cgaccacccggcctcggccaataagcgccgccctctcgcccccgtgttactgggtagaagaaaacaaaaacaaacagagcgagaagggccagagactctccgaggcggcggcagagacagaagagcggggtcggggccggctgaccaggaacctgggcgagcagcggcgggggcccgagggattctgaaggaagatttccattaggtaatttgtttaatcagtgcaagcgaaattaagggaaaatggatgtagaaaatgagcagatactgaatgtaaaccctgcagggtattttccctaattctccatggtgcttcaatagcatgttattatcataaaaatgaacagttttgtggaatagatgaccaaatatcctgataacttaagtgactctctcttttccggtgatgaagaaaatgctgggactgaggaaataaagaatgaaataaatggaaattggatttcagcatcctccattaacgaagctagaattaatgccaaggcaaaaaggcgactaaggaaaaactcatcccgggactctggcagaggcgattcggtcagcgacagtgggagtgacgcccttagaagtggattaactgtgccaaccagtccaaagggaaggttgctggataggcgatccagatctgggaaaggaaggggactaccaaagaaaggtggtgcaggaggcaaaggtgtctggggtacacctggacaggtgtatgatgtggaggaggtggatgtgaaagatcctaactatgatgatgaccaggagaactgtgtttatgaaactgtagttttgcctttggatgaaagggcatttgagaagactttaacaccaatcatacaggaatattttgagcatggagatactaatgaagttgcggaaatgttaagagatttaaatcttggtgaaatgaaaagtggagtaccagtgttggcagtatccttagcattggaggggaaggctagtcatagagagatgacatctaagcttctttctgacctttgtgggacagtaatgagcacaactgatgtggaaaaatcatttgataaattgttgaaagatctacctgaattagcactggatactcctagagcaccacagttggtgggccagtttattgctagagctgttggagatggaattttatgtaatacctatattgatagttacaaaggaactgtagattgtgtgcaggctagagctgctctggataaggctaccgtgcttctgagtatgtctaaaggtggaaagcgtaaagatagtgtgtggggctctggaggtgggcagcaatctgtcaatcaccttgttaaagagattgatatgctgctgaaagaatatttactctctggagacatatctgaagctgaacattgccttaaggaactggaagtacctcattttcaccatgagcttgtatatgaagctattataatggttttagagtcaactggagaaagtacatttaagatgattttggatttattaaagtccctttggaagtcttctaccattactgtagaccaaatgaaaagaggttatgagagaatttacaatgaaattccggacattaatctggatgtcccacattcatactctgtgctggagcggtttgtagaagaatgttttcaggctggaataatttccaaacaactcagagatctttgtccttcaaggggcagaaagcgttttgtaagcgaaggagatggaggtcgtcttaaaccagagagctactgaatataagaactcttgcagtcttagatgttataaaaatatatatctgaattgtaagagttgttagcacaagttttttttttttttttttttaagcacttgttttgggtacaaggcatttctgacattttataaacctacatttaaggggaatttttaaaggaaatgttttttcttttttttttgtttttcgagggggcaaggagggacagaaaagtaacctcttcttaagtggaatattctaataagctaccttttgtaagtgccatgtttattatctaatcattccaagttttgcattgatgtctgactgccactcctttctttcaaggacagtgttttttgtagtaaaatcactggtttatacaaagctttatttagggggtaaagttaagctgctaaaaccccatgttggctgctgctgttgagatactgtgctttgggagtaaaaaaagaaagttatttctttgtcttaaagaatttttaaaaaattagtcatgagacttattcatctttccagggaacatactgattggtcttaaaagactagacagttaagtaaaaggtggctggaacatctatttttctacaaaactggaaaaatgaacctggttctagaagaatgtacaccaaaataaaacatgtgaagcagtattgattctttattgggagtacatttttttaggtctcttaaactttaatttcacacagtaaattttgaatctcataaggaagcatatttgaacctagtcaatttaatcttagtgttcccttgaaaactttttttccctacaaaattttaagtgaaaaatacaatagtaaattaagattacactggggaaaaaaatgcaggtatcactttactccattgttatctgacctagagcttaattaagttttagaaatatgtaataccttccatcattccatcatccttaaattctgttaccaaataatggctaatgttacaaaaagttatactccagagacccaaagcttgacatttacctaatgtatgagaaaatattaccaattaacaataaagaatgatcatatttttaacctcttttacatagcctaataactcagcaaggcctcaacgtctgtgctaatttaaactgccaaatattgactgcagcaaacaagaattatattcagaatttatgagggtactgttaggagtatactgcttacaggtttagatatagtctgttagaattaaaaccaagtttagtgttcatatttacctcatgggctttatcaagcccatattacctcagcttatatatagttaccatttttaggtttttaattgtttgacacttggatgataaatgcagtcattttattctcaagtgcttaaaattaatgtaattaaaagcttagctgactacagaataggtgagggtttcttaaaaatgagatttaagggctgggcacggtggctcatgcctgtaatcccagcactttgggaggccgaggtgggcggatcacttgaggttgggagttcatgaccagcttgaccaacatgaagaaaccctgtctctattaaaaatacaaaagtagccaggcatggtggcgcatgcgtgtaatcccagctacttgggaggctgaggcaggagaattgcttgaacctgggaggcagaggttgcagtgagtcgagatggtgccattgctctcgtttgggcaacaagagtgaaactcttgtctcaaaaaaaaaaaaaaatgaggtttaagacagttttgtcattactggtgggatctggtcacacaagatagcattaaacgtgacatggcacataaaattggttaaaaaattttgttttttaattacgtaatgtaaaagcccaacaaacactttatgcaagattggaatgtatcttcaaattcagatttaataaacatgtaaagatcctctgtaaaaaaaaaaaaaaaaaaaaa

SEQ ID NO: 42 - DNA, 1180 bp, Homo sapiens
ccgggtcactgttaagggggccgccatggcccggctgtggggcgcgctgagtctttggccactgtgggcggccgtgccgtggggcggggcggcagccgtcggtgtccgggcttgcagctccacggccgccccggacggcgtcgagggcccggcgctgcggcgctcctattggcgccacctgaggcgtctggtgctgggtcctcccgaaccgccgttctcgcacgtgtgccaagtcggggacccggtgctgcgcggcgtggcggccccggtggagcgggcgcagctaggcgggcccgagctgcagcggctgacgcaacggctggtccaggtgatgcggcggcggcgctgcgtgggcctaagcgcgccgcagctgggggtgccgcggcaggtgctggcgctggagctccccgaggcgctgtgtcgggagtgcccgccccgccagcgcgcgctccgccaaatggagcccttccccctgcgcgtgttcgtgaaccccagcctgcgagtgcttgacagccgcctggtcacctttcccgagggctgcgagagcgtcgccggcttcctggcctgcgtgccccgcttccaggcggtgcagatctcagggctggaccccaatggagaacaggtggtgtggcaggcgagcgggtgggcagcccgcatcatccagcacgagatggaccacctgcagggctgcctgtttattgacaaaatggacagcaggacgttcacaaacgtctattggatgaaggtgaatgactaaagctttgctactggggctgaggattccggataccaagacgcaaacactttcactttgagctgggcaaatcttacttggcatcaacttggatggctcgcatatgacaggaaactggattgccaaggcatggcagactgagctggaggaagatgtcagaaatgtttgccctgaaatcagttacggacaaaatgttggctacaacttgaggagaaaaatcacccccaaaggagtggacatttcctaacaattctgtatggaggaaggtggggtaattgcattcgtctgcagtagacacgagttcctcggacctgtataatctcccaaagccaaggtttggtaataatgtagtccccaaatacctgaaagctgtctttaaaaatgcaggtaagcatgtgactggcaaaaaaaaaaaaaaaaaaaaaa

SEQ ID NO: 43 - DNA, 6342 bp, Homo sapiens
agcgccggctcgggcagcggaggcgccgccggaagttccttgggctgctggactcctcggcttgaaacggcgccggcgtgggggcgtgtgcccttggccctgtcccaggtggagagtggtcgagccgcgcgcagggtgcgctcgtttgaactgcggtgacaccgagggttggggactcgaacccccgcttcgcagctcaggagcctgaggtccgaaagcttcgttccagagcccagcatgaatggatacgcggaatttccgcccagccccagtaaccccaccaaggagcccgtggagccccagcccagccaggtcccactgcaggaagatgtggacatgagcagtggctccagtggacatgagaccaacgaaaactgctccacggggcgggactcgcagggcagtgactgtgacgacagtgggaaggagctggggatgctggtggagccaccggatgcccgccagagtccagatacctttagcctgatgatggcaaaatctgaacacaacccatctacaagtggctgcagtagcgaccagtcttcgaaagtggacacacacaaagaactgataaaaacactaaaggagctgaaggtccacctccctgcagacaagaaggccaagggcaaggccagtacgctggccaccttgaagtacgccctcaggagcgtgaagcaggtgaaagccaatgaagagtattaccagctgctgatgtccagcgagggtcacccctgtggagcagacgtgccctcctacaccgtggaggagatggagagcgttacctctgagcacattgtgaagaatgccgatatgtttgcggtggccgtgtccctggtgtctgggaagatcctgtacatctctgaccaggttgcatccatatttcactgtaaaagagatgccttcagcgatgccaagtttgtggagttcctggcgcctcacgatgtgggcgtgttccacagtttcacctccccgtacaagcttcccttgtggagcatgtgcagtggagcagattcttttactcaagaatgcatggaggagaaatctttcttttgccgtgtcagtgtccggaaaagccacgagaatgaaatccgctaccaccccttccgcatgacgccctacctggtcaaggtgcgggaccaacaaggtgctgagagtcagctttgctgccttctgctggcagagagagtgcactctggttatgaagcccctagaattcctcctgaaaagagaatttttacaaccacccatacaccaaattgtttgttccaggatgtggatgaaagggcggtccctctcctgggctacctacctcaggacctgattgaaaccccagtgctcgtgcagctccaccctagtgacaggcccttgatgctggccatccacaaaaagatcctgcagtcaggcgggcagcctttcgactattctcccattcggtttcgcgcccggaacggagagtacatcacgttggacaccagctggtccagcttcatcaacccatggagcaggaaaatctccttcatcattgggaggcacaaagtcagggtgggccctttgaatgaggacgtgtttgcagcccacccctgcacagaggagaaggccctgcaccccagcattcaggagctcacagagcagatccaccggctcctgctgcagcccgtcccccacagcggctccagtggctacgggagtctgggcagcaacgggtcccacgagcaccttatgagccagacctcctccagcgacagcaacggccatgaggactcacgccggaggagagccgaaatttgtaaaaatggtaacaagaccaaaaatagaagtcattattctcatgaatctggagaacaaaagaaaaaatccgttacagaaatgcaaactaatcccccagctgagaagaaagctgtccctgccatggaaaaggacagcctgggggtcagcttccccgaggagttggcctgcaagaaccagcccacctgctcctaccagcagatcagctgcttggacagcgtcatcaggtacttggagagctgcaatgaggctgccaccctgaagaggaaatgcgagttcccagcaaacgtcccagcgctaaggtccagtgataagcggaaggccacagtcagcccagggccacacgctggagaggcagagccgccctccagggtgaacagccgcacgggagtaggtacgcacctgacctcgctggcactgccgggcaaggcagagagtgtggcgtcgctcaccagccagtgcagctacagcagcaccatcgtccatgtgggagacaagaagccgcagccggagttagagatggtggaagatgctgcgagtgggccagaatccctggactgcctggcgggccctgccctggcctgtggtctcagccaagagaaggagcccttcaagaagctgggcctcaccaaggaggtactcgctgcacacacacagaaggaggagcagagcttcctgcagaagttcaaagaaataagaaaactcagcattttccagtcccactgccattactacttgcaagaaagatccaaggggcagccaagtgaacgaactgcccctggactaagaaatacttccggaatagattcaccttggaaaaaaacaggaaagaacagaaaattgaagtccaagcgggtcaaacctcgagactcatctgagagcaccggatctggggggcccgtgtccgcccggcccccgctggtgggcttgaacgccacagcctggtcaccctcagacacgtcccagtccagctgcccagccgtgccctttcccgccccagtgccagcagcttattcactgcccgtgtttccagcgccagggactgtggcagcacccccggcacctccccacgccagcttcacagtgcctgctgtgcccgtggacctccagcaccagtttgcagtccagcccccacctttccctgcccctttggcgcctgtcatggcattcatgctacccagttattccttcccctcggggaccccaaacctgccccaggccttcttccccagccagcctcagtttccgagccaccccacactcacatccgagatggcctctgcctcacagcctgagttccccagccggacctcgatccccagacagccatgtgcttgtccagccacccgggccaccccaccatcggccatgggtagggcctccccaccgctctttcagtcccgcagcagctcgcccctgcagctcaacctgctgcagctggaggaagcccctgagggtggcactggagccatggggaccacaggggccacagagacagcagctgtaggggcggactgcaaacctggcacttctcgggaccagcagccgaaggcgcctctgacccgtgatgaaccctcagacacacagaacagtgacgccctttccacgtcaagcggcctcctaaacctcctgctgaatgaggacctctgctcagcctcgggctctgctgcttcggagtctctgggctccggctcactgggctgcgacgcctccccgagtggggcaggcagtagtgacacaagtcataccagcaaatattttggaagcattgactcctcagagaataatcacaaagcaaaaatgaacactggtatggaagaaagtgagcatttcattaagtgcgtcctgcaggatcccatctggctgctgatggcagatgcggacagcagcgtcatgatgacgtaccagctgccttcccgaaatttagaagcggttttgaaggaggacagagagaagctgaagctcctacagaaactccagcccaggttcacggagagtcagaagcaggagctgcgcgaggtccaccagtggatgcagacgggcggcctgcccgcagccatcgacgtggcagaatgtgtttactgtgaaaacaaggaaaaaggtaatatttgcataccatatgaggaagatattccttctctgggactcagcgaagtgtcggacaccaaagaagacgaaaatggatcccccttgaatcacaggatcgaagagcagacgtaacccctgccccacctcagcccggcagccagcgaggtacaccaggtggtgcttggaagagatgaaagatcttcatggctgtttccactgaaatggacacatatgctcatgttgctttttttgttttagaaaaaaaaacaacatagttttctgaaggggcgacttaaaactgtggagagtggggagagttcggaaagaaatatgtttttatatataaaatatatatgtggagttttgtgggatggggaagagattttagttgttatttaacttgagaaagactaagcgcctcttagtgtcagggaagttgcctcagtgctcccagaagtcctgtgactgtgacgagacctctgtctgctgcaccagctggggactctggcttccagagctttcccagggtgtttggatcagatcaaattttgtcctctcttggggactgctttttatctgaattatcatttagtcaaggtagagtgtttttttatacataccaaatggagatagcagcctctcctagttttatttcaaaacgtttcacattaaatggtgtgaagcgttgtttggcaaaccaacagctttggcttctggtgtggtcaatatttcagtctgacataggttttgtttgtagtgaacaaagttgaaacatttgctctggactaaagaagcctagtggtttgtgtggccaactccatcggatgaatgcacacgcagacagaccctctgtatatttctgcattattcttgtctccttttcagaccatgatggccaatatggagattaaaatatgtcatcagtcatctctttatggtgacttccctttgcaaaccaggctgtgaccaacacatgtgagacccagtcctgtttggttttcttccgttggaaccacccagacatctgcttccacccagccaagcccacatcacatctcctggccgagagcagccactgccactcagtctgacagcttgcgactgcatctgtattttcaggggtgcagtgagctcacctctcccactgcaccctgggttgggtgcacagccctcattcttttcatgagcccgacctctctcggagcagcttcaggcctctgccagtgtccccagcacttttaggtcatttggacacttggggaaaagtgaggccagtctgcccggctttttacaaaacctcatgttgcattgtatattccaaagatggttcagaaaatttaatattggtccctggtggaaattcaaagttatcactgaagaacagttgacttaaaattggaccaagactatgaggcttaaaagggaccagggttttcttttttttttttttttttttttttttttagatggagtttctttttgcccaggctggagtgcagtggcgccatcttggctcactgcaacctctgcctcccaggttcaagcgattctcctgcctcagcctcctgagtagctgggaccacaggcgactgccaccacacccagctaattttttgtatttttagtagagacagggtttcaccatgttggccaggctggtctcgaactcctgacctcaagcgatccacccacctcggcctcccaaagtgctgggattacaggcgtgagccaccacgcccaactgggaccagggttttctgttttttgatggaggtgaaatctctttgtaatccactaggttttcatcgtaaaaccatcttatgcctgactattaaacctattcttcataaacacaagaacactttaatttttcgttaatttacaaagtaacatcagctgcctatgcctatgataaggtagcagtctgcattcttatggccattagatgttacaaactccttgcctctaaagtcagatcatgaagggataggtgttcatctaaggttacagttatgttaccgaaacacaaaactgccaaaatcttactctgctgttatgaatgtttaccatcagcattattttatcatttaatatgtgctcactgattgttaactgtagcttcagcgcgtgccaagcagttgacttaataggatcatcttgtgaatttgtttacgtgatgccaagcatcaagtcatgttttctttagtgtgtgtgcttacacaggtgttaaacagtttttctctattttaaactgagccttctttttaatatattcccgaagagatatgtaaataagctctcagagtttctgtgatgatttgttgagccttgctggacaagtggtttgtttgtgtgcaaaccaaactttctttacccagtgcaatagatttgtttgactgcttgtgtctttttatgacctgtttgccttttagaaaattggtaaataaagcaagtatatttttattttta

SEQ ID NO: 44 - DNA, 3173 bp, Homo sapiens
atggccctgtccactgagcatcctcccgccacacagaaacccgcccagccggggccaccgaccccaccccctgcctggaaacttaaaggaggccggagctgtggggagctcagagctgagatcctacaggagtccagggctggagagaaaacctctgcgaggaaagggaaggagcaagccgtgaatttaagggacgctgtgaagcaatcatggatgcaatgaagagagggctctgctgtgtgctgctgctgtgtggagcagtcttcgtttcgcccagccaggaaatccatgcccgattcagaagaggagccagatcttaccaagtgatctgcagagatgaaaaaacgcagatgatataccagcaacatcagtcatggctgcgccctgtgctcagaagcaaccgggtggaatattgctggtgcaacagtggcagggcacagtgccactcagtgcctgtcaaaagttgcagcgagccaaggtgtttcaacgggggcacctgccagcaggccctgtacttctcagatttcgtgtgccagtgccccgaaggatttgctgggaagtgctgtgaaatagataccagggccacgtgctacgaggaccagggcatcagctacaggggcacgtggagcacagcggagagtggcgccgagtgcaccaactggaacagcagcgcgttggcccagaagccctacagcgggcggaggccagacgccatcaggctgggcctggggaaccacaactactgcagaaacccagatcgagactcaaagccctggtgctacgtctttaaggcggggaagtacagctcagagttctgcagcacccctgcctgctctgagggaaacagtgactgctactttgggaatgggtcagcctaccgtggcacgcacagcctcaccgagtcgggtgcctcctgcctcccgtggaattccatgatcctgataggcaaggtttacacagcacagaaccccagtgcccaggcactgggcctgggcaaacataattactgccggaatcctgatggggatgccaagccctggtgccacgtgctgaagaaccgcaggctgacgtgggagtactgtgatgtgccctcctgctccacctgcggcctgagacagtacagccagcctcagtttcgcatcaaaggagggctcttcgccgacatcgcctcccacccctggcaggctgccatctttgccaagcacaggaggtcgcccggagagcggttcctgtgcgggggcatactcatcagctcctgctggattctctctgccgcccactgcttccaggagaggtttccgccccaccacctgacggtgatcttgggcagaacataccgggtggtccctggcgaggaggagcagaaatttgaagtcgaaaaatacattgtccataaggaattcgatgatgacacttacgacaatgacattgcgctgctgcagctgaaatcggattcgtcccgctgtgcccaggagagcagcgtggtccgcactgtgtgccttcccccggcggacctgcagctgccggactggacggagtgtgagctctccggctacggcaagcatgaggccttgtctcctttctattcggagcggctgaaggaggctcatgtcagactgtacccatccagccgctgcacatcacaacatttacttaacagaacagtcaccgacaacatgctgtgtgctggagacactcggagcggcgggccccaggcaaacttgcacgacgcctgccagggcgattcgggaggccccctggtgtgtctgaacgatggccgcatgactttggtgggcatcatcagctggggcctgggctgtggacagaaggatgtcccgggtgtgtacaccaaggttaccaactacctagactggattcgtgacaacatgcgaccgtgaccaggaacacccgactcctcaaaagcaaatgagatcccgcctcttcttcttcagaagacactgcaaaggcgcagtgcttctctacagacttctccagacccaccacaccgcagaagcgggacgagaccctacaggagagggaagagtgcattttcccagatacttcccattttggaagttttcaggacttggtctgatttcaggatactctgtcagatgggaagacatgaatgcacactagcctctccaggaatgcctcctccctgggcagaaagtggccatgccaccctgttttcagctaaagcccaacctcctgacctgtcaccgtgagcagctttggaaacaggaccacaaaaatgaaagcatgtctcaatagtaaaagataacaagatctttcaggaaagacggattgcattagaaatagacagtatatttatagtcacaagagcccagcagggcctcaaagttggggcaggctggctggcccgtcatgttcctcaaaagcacccttgacgtcaagtctccttcccctttccccactccctggctctcagaaggtattccttttgtgtacagtgtgtaaagtgtaaatcctttttctttataaactttagagtagcatgagagaattgtatcatttgaacaactaggcttcagcatatttatagcaatccatgttagtttttactttctgttgccacaaccctgttttatactgtacttaataaattcagatatatttttcacagtttttccaaaatcagagtggaatggttttgttatagatgctgtatcccactctttattcatgttcacattttaaaatcatttggaattctgcttcactcgcttaacatatacacaacacctgtaacatacaaggcaatgggctaggtgctccagaccgggaaaaggagggacaggaatgcttggtctgatgggctaatatggcatttagagaagtaccaaggtacagtggagccggtcacaaaagggcagacttgtagtagaattcagttgcaagagggattggggaatcttaaggaaaaaatagaatcttaaggaaaaaataactgggtgagacgtggactgtggacaggtgtggaaaaggcactctccatggaggtatgaatatgtagagggccaagagaggggagtacagggagaaatgagttgagcttgtctgaagtgaacttcaggaagaggaacataggctggaatttagattatgggggctctgaacaccaaactgagtttggacttaattgacttctg

SEQ ID NO: 45 - DNA, 3310 bp, Homo sapiens
gacctcgtgaaataaaagtgcagaaaacaaacccaggcgatcacagcagcagccgccgcggcagcagcaccaacagcaggaggagcaggaggagccggaggaggaggaggaggaggaggcaaagttagagttggggctggcgctccggagttgctgggctcagcgcagctcccattcattaaggaaccagctgcggaggaaggtggccgagcgcccgcgctgcccactcgctcgctcgcgcactcagacgcgcgccacaacagcgcgccccaagctgcgcagctctgcaaaagtttctgctcgggatctggctctcttccccttggactttagaacgatttagggttgacagaggaaagcagaggcgcgcaggaggagcagaaaacaccaccttctgcagttggaggcaggcagccccggctgcactctagccgccgcgcccggagccggggccgacccgccactatccgcagcagcctcggccaggaggcgacccgggcgcctgggtgtgtggctgctgttgcgggacgtcttcgcggggcgggaggctcgcgccgcagccagcgccatgcaaaactacaagtacgacaaagcgatcgtcccggagagcaagaacggcggcagcccggcgctcaacaacaacccgaggaggagcggcagcaagcgggtgctgctcatctgcctcgacctcttctgcctcttcatggcgggcctccccttcctcatcatcgagacaagcaccatcaagccttaccaccgagggttttactgcaatgatgagagcatcaagtacccactgaaaactggtgagacaataaatgacgctgtgctctgtgccgtggggatcgtcattgccatcctcgcgatcatcacgggggaattctaccggatctattacctgaagaagtcgcggtcgacgattcagaacccctacgtggcagcactctataagcaagtgggctgcttcctctttggctgtgccatcagccagtctttcacagacattgccaaagtgtccatagggcgcctgcgtcctcacttcttgagtgtctgcaaccctgatttcagccagatcaactgctctgaaggctacattcagaactacagatgcagaggtgatgacagcaaagtccaggaagccaggaagtccttcttctctggccatgcctccttctccatgtacactatgctgtatttggtgctatacctgcaggcccgcttcacttggcgaggagcccgcctgctccggcccctcctgcagttcaccttgatcatgatggccttctacacgggactgtctcgcgtatcagaccacaagcaccatcccagtgatgttctggcaggatttgctcaaggagccctggtggcctgctgcatagttttcttcgtgtctgacctcttcaagactaagacgacgctctccctgcctgcccctgctatccggaaggaaatcctttcacctgtggacattattgacaggaacaatcaccacaacatgatgtaggtgccacccacctcctgagctgtttttgtaaaatgactgctgacagcaagttcttgctgctctccaatctcatcagacagtagaatgtagggaaaaacttttgcccgactgatttttaaaaaggaaaaaaaaaatgttttactatgtggccttccaaaataggtagtgtttgcctatgtggaaacaacagcaaactaacaccaagtgccagagtcctggatgtgcaattggtttaagtgttcatgttctagtgaacacagcttgttcaggaacaaacactaaaacgatttgagtagaggctgctggtcaccttttgtgacctgaggaatcccaggcctgtgagaaaagcaaaaattcacattgcagcacatgatgccagaaatagcactgaatcaagaaaatagccattgcggagctgccctcttgagtctttctgtccatcccattctattctgtactgtgactttagttcaggaagttttgttttgtgttttaaataaaaggaaagagcaagtttgctcagtcaagtgatcagatcccgaatctagattcccagttctaaggccttatcacctcccctgcccataggccaacaaccatagttcctcacattagtgattagcagactctttgtggacgagtgaatttcacaaacagcacaatttcagaagaaatcgagggcacaggccctcacttttcttcttttgacgcatcatcctgtgatgttgaaatgtcaattgcaggatgctgatgttgtgcacgtcaatcaccgggcacttgcatactcttagaaacagttcgacttcggttactgccttctcccttgaaatccttgctgcgtgcccaccaggatttcctgtgagggcccaggaatgagcaaggcatggtctgccaccagctgacggaaagcagccttctgtacaacagatgggagggtgaagggggcagaatgaaaatcgaaccaaccttttagctgttgcaaatcagaaggagccagagaagcaggcagtctcatgcatgagaggttacccttcaggatgacagagctgagggtctttgtaggagttgctcttgctgtgtaaagcactattgtcttggggttgagccctagggcagttcttggtaggttctgctgggcagaacatatgggttaaatctcggtagagagtttccctcatcctctatccgtaagtgtccttccatgcaaggtcccactctaggtgatagacagggaccccttctactgaacctttgaggaaaggaggaaggaagaaatgcgtttagatcttggatgcagacctttcaaagggttaaatgtaaccatatggatcaaccacatgcacatccttactacagaatccgtcctttcatttcaacttatagcaagctatgatttttatatataaatattatataaataatgtataaaacattaaaagttaactatgtaagatattatttctgaaacaatttagctatatccactatgattataaactgtgtctcgacctgtgttatttacattagctgcttaaaaaagcattgagttaatttttttaaatatcaactaaaatatcatagttctgtggtagacattgttttataatgaaataactgcaactagagaaaactgtataaaaacattaaattgtcagtatttttgtaaggttccattttgtaaagagaataatattcaaagacttttgtagcatacaaagtgaaaacttgtatctgcgaaactatacttgtattaaatgtgctttttaaataaaagctcgtaacacaactaaaaaaaaaaaaaaaaaa

SEQ ID NO: 46 - DNA, 5561 bp, Homo sapiens
agggggccgactggcgcggctctggagagcgctcctccgccccgcgcgccgtccctgcgccccgctccgcccgcgcctctctcccagcgccgcgcctcgggcgtaaagagcgcgcccctcgcaccgcagccagtgccgaccgcagcagcccagccccagccttcctccgcctccgcctctctctcctcctcctcctccgccgccggacacgcagccgcaggccgggaccgggacgcagctggggagtcagggacgcgcgcagccagcccttccccctccggctcccgcaccgccggccgcctcccctcgccctcctactctcccctccctgctccttcgctttttcctcctcctcctctcccggccccggctgccagcaccatgtccgcagggggagattttgggaatccactgagaaaattcaagttggtgttcttgggggagcagagcgtcgggaagacgtctctgattacgaggttcatgtacgacagcttcgacaacacataccaggcaaccattgggattgacttcttgtcaaaaaccatgtacttggaggaccgcacggtgcgactgcagctctgggacacagctggtcaggagaggttccgcagcctgatccccagctacatccgggactccacggtggctgtggtggtgtacgacatcacaaatctcaactccttccaacagacctctaagtggatcgacgacgtcaggacagagaggggcagtgatgttatcatcatgctggtgggcaacaagacggacctggctgataagaggcagataaccatcgaggagggggagcagcgcgccaaagaactgagcgtcatgttcattgagaccagtgcgaagactggctacaacgtgaagcagctttttcgacgtgtggcgtcggctctacccggaatggagaatgtccaggagaaaagcaaagaagggatgatcgacatcaagctggacaaaccccaggagcccccggccagcgagggcggctgctcctgctaatgcagagccgacctgtggcttcccatgacactccttgcttgttgtgttgcttcctattggctagcttcctaaggggggagggaaccgagttatcaagatgggaggatttttcttttctctctgtctttaggagtagggtgggatggggagggaggctgggcatcagggatcacatcactcttaacggctgttacttaaacaactattttttggtttggttgtaatatattgtactttattaagattgccaaaaactgttaaaatttaaaaaaaatttaaatcatgtgtatacaattttttgccagataaaaatgtagtcatttttatttgaaagatgtgctttttgtttttgtatatttgtaaacttatagagaaccttttccacacacctcctccttcctgttctctttgaaccattcatcacctctgccttcctcctatccccagcccaataaattaaaacaattaactgagcaaattaattaggcttcagtctggggccatctggccccactctctaggccctactccagttaaatcaaacattggttgaacacatcagcctctgaaaaggtagctctgactcttgtctttccatggccagagtgggtcgtcaacctcgtgtggagctgagaccaaggtctgtgggctctaggcagcccggcagcagcccccagaggaactgctcccacctctccttctctttccctgaaaagccttgaagggggttgagggtacaggcaaccttgtgttctctgtgccctcagggactggcagagcaagaggccatcagaaggacgaggtgctgttggcaattgcagctgcgtggtgcgtggtttatagactggggtgccatgtgtacttctgaaaatattttaaccagcccacccagcagtcagtacacatgcctgggccaagtctaagaaactcagtgtgtgatgttgggcagtgtgccatcctgaagccttcctcctggatgtcagggaagctggaccacctggagttgatcctctgtgatggggaggcgggggggggggggggtgttgtctgcagaaccaccaccttgaaagatccatgttcttagagcctcagctgctaatattgttgagtgctttctggaaaagctgatttgttgctatgttttcaccccagtggcatggcgcagttgaagtctttgtggacatatctttgtggctactgtggctgcgctgtggtcacctgaggatgtggttcaggtggggtctccagaaggctgcttgcccccagagagccatctcttccatttttgattcattcctgagaatggcttagtcctgagaatctgcaaagtctctgaagagaactctctcttcccactaagtgatataacctacttggccagcattccaaatagactcagactcactgccctgagcctgcacagagccaggtgcaatgggcagtgagtctggccaaaatgtaaaccccaccctccctgctgtcattggctctccctccaggctgctgctgggcatgtcatagatgggatgaatgaccatctggggtatggtgggctgaactccacaaggtcgttggaatgaattttgaaacttctcagaaattaatctgaaatggcaggcagtaagtgcagcagaatctggcaggactgatatttgtgcagtgggcctgccacacaccctctgcctaggaggctgtatgccagagctcatctctagcaaggaatttatcttcaggtgaagaagagaggaagcaggatcccactgagcacctcttgcagaaggcaaggaccaatgtttgaacgtgtttcagatgtcatgtgtttagtttttatatgtgtgtacataattatatatagagatagacttgtgtatacaccttccacaaacacatcctcacggagatacatgtgctcaatgtatattcttgtttctcctgctctcaagttggaacttgcattgtgataagttttggaaattcaaaagtactgcaacgtgttgaaataagaaatacttaatattgtcaaataacttgtgattgtcttgccatcaataaaataatgcatagttgtgttaaactacaggcaaacatagcccacgggaatatctccaccatttctctatgtactttatatgcacgggtgtgcatgcctgtgtgggccagtgtccccccaccatgggcacacccccaagtggtgcttgttggaagagtgcttacttacctcgagagaatttacaggagtccacatgacagtgtcctgcctggttggcagcgggggccatcacctgtggcctctgagaccgccccatttacaggaatctgcactgggtctcagtgaatgaacgtatggtagatttttattttcttggcactaaagattagcttttttaaaaaaacatcccataaaacagtagaaactcagttcccttctcaggggcacacacatccaaggcaccgtggactgtgtttccatcctggcctagaggagcagtaaaagatagcatttggtttgacatggccttagtgagtcctgcctttcctagcatgcacacaacatcctctctttgagtttgggttctccccagccccttggcctctgaggctgagggtggcttcctcccatcctcccatctcagtggttccatggcgctcccttcggcacgtgcggtttccgcccctcccttcctggggtgtggaaaggcagccagacctctttttcagaagttgttggttccctgatttttgtcttgagcaggcaccatccctgtccccttgcttgcaggtagaattggcacagagttaaggttccataataaactgttaggtgctcttgaagaagatgtcatggcattgcctcagcaccccagcaagagcattgcatctttgctgaatccagatgggttagcagagggcaaattggaggattcctttgaggaaatgttctcaattgagcaattcagtccctctccccaaagactagacgtgacctggcagattagcaggatcctcttggccttcttttttggggatggtgggagtgaagggggtgaatcttaaaagcttatcaacaaagctcctgttctgcaggcatcaggaaagttgagtgtaagatggaaaaagcaaacagcctatttacaagtggaaacacattggttctgatcactcctaacttgctgggtgatcatacatacatcaacatgaaggtgtgacatcagaatcatgagcaccatggctgcagttgtgtgatccaaggctagttggcttggtagctgttggcagcagtttcccttggtcagaggcctccttgctatctatcgctgctctcttcttgtcatccttaaacattcagtcatgttcccaggtctgaggggagcaatggccagaccagtttcagtatctctggcaacagaaacaaggattgaaatggtggtagttaagagtgcagacacatctggggtgcaacgtctgcatcatcctggtggctagccagtgcggggaggccctgccctgggataccagttgtgacaataaagggatggccctcctggcttcagcatcctgcaggtagagcagcctcattccttcacaagatggaaggcaggtgaggatgtcaggatgagatgggaccaggtagccgaggacagtgaggcatgtctgagccacttgaggggcagctgaacagaaggatgtctgtgtgcatcaaccgagcagattgtgcgcacactcgtttccgaactgcctctccccaaagaatgtgaggcattgtcaccttgttacagctatgtgaagcagagctgtcacaacttttcctgtctacaggcaggaaaaccaggatggagaagggcaacttgcttattaagatcacccagcaagttaggagtgatcagaaccagtgaagtttccatttttcatccattgctgccctgtgtgtgaacaaatgtgactccatatttattacacagcaaggactgctgtgtgtgggtgtgttcctcagaccatctctactctttttggttaggacactaggttcttcccagcatatgagtgagaatattggtggtattttgggctcctctactgcacaagggccagtccccaagtctactctgattgattgtcatgggcacccacacagatcaggacaccctttgaatttttgtttgacatgaactatttaggtgttccaaaaccttgggatctcaatgtgcaaactccttggactccagacccctgtctggttggcactcccagcagtgtgtggtttcatcaggaaatccttgcagcaggggtttagatggttccttcaggaggtgggaagcctccatagcattgaaggccagcctgcatctcgcggtgtgtgtccacttctcccctcactttcccctcacccatccctttaaagtgattggctgtgaggagcacagagggtggcaattccatctgttatgggctcagaagacatagccgccatgttgatttcacattaaactgtgtaaaatgtggaaaagactcagcatgttggtcaaacaataaactgtcctaattctcaaaacaaa

SEQ ID NO: 47 - DNA, 1126 bp, Homo sapiens
tccccatgtgacagtgagcggggtccccgctccaggagacgctcgagtctgcgtcccggccctcagcactgtccactgtttcggtgccagcagagaccagcaggcccgggacagttggtgtttggccgtgccgctgtctaacttggtgtgcagagtgaattgccgctgccggagcggagagaggcggagcggccaggagagaggggatttctgtcagcgccggcctcgggagctcggagacatgaacggcttcacgcctgacgagatgagccgcggcggggatgcggccgccgcagtggccgcagtggtcgctgccgcggccgccgccgcctcggcggggaacgggaccggcgcgggcaccggggctgaggtgccgggcgcgggggcggtctcagcggctgggcccccgggggcggccgggccgggccccgggcaactgtgctgcctgcgggaggatggtgagcggtgcggccgggcggcaggcaacgccagcttcagcaagaggatccagaagagcatctcccagaagaaggtgaagatcgagctggataagagcgcaaggcatctttacatatgtgattatcataaaaacttaattcagagtgttcgaaacagaagaaagagaaaagggagtgatgatgatggaggtgattcacctgttcaagatattgataccccagaggttgatttataccaattacaagtaaatacacttaggagatacaaaagacacttcaagctaccaaccagaccaggacttaataaagcacaacttgttgagatagttggttgccactttaggtctattccagtgaatgaaaaagacaccttaacatatttcatctactcagtgaagaatgacaagaacaaatcagatctcaaggttgatagtggtgttcactaggagacgtggaattgagactaataacttggatgttaacactgtttactgttttttcacatgtagaaatgttctttgtgtattttttctacagaggattttctctgattttattttctttgtttctgactctaataattagttggaaactcatataaaatgagctttcctaaattaaatctattttaaataaaggttattactattaaaaaaaaaaaaaaaaaa

SEQ ID NO: 48 - DNA, 2035 bp, Homo sapiens
ttaaagtcgcccccggcgcggagcggaccggcagaggcgggcagaggcggcgagaggcggcgagaggcgggctgaggcggcccagcggcggcaggtgaggcggaaccaaccctcctggccatgggaggggccgtggtggacgagggccccacaggcgtcaaggcccctgacggcggctggggctgggccgtgctcttcggctgtttcgtcatcactggcttctcctacgccttccccaaggccgtcagtgtcttcttcaaggagctcatacaggagtttgggatcggctacagcgacacagcctggatctcctccatcctgctggccatgctctacgggacaggtccgctctgcagtgtgtgcgtgaaccgctttggctgccggcccgtcatgcttgtggggggtctctttgcgtcgctgggcatggtggctgcgtccttttgccggagcatcatccaggtctacctcaccactggggtcatcacggggttgggtttggcactcaacttccagccctcgctcatcatgctgaaccgctacttcagcaagcggcgccccatggccaacgggctggcggcagcaggtagccctgtcttcctgtgtgccctgagcccgctggggcagctgctgcaggaccgctacggctggcggggcggcttcctcatcctgggcggcctgctgctcaactgctgcgtgtgtgccgcactcatgaggcccctggtggtcacggcccagccgggctcggggccgccgcgaccctcccggcgcctgctagacctgagcgtcttccgggaccgcggctttgtgctttacgccgtggccgcctcggtcatggtgctggggctcttcgtcccgcccgtgttcgtggtgagctacgccaaggacctgggcgtgcccgacaccaaggccgccttcctgctcaccatcctgggcttcattgacatcttcgcgcggccggccgcgggcttcgtggcggggcttgggaaggtgcggccctactccgtctacctcttcagcttctccatgttcttcaacggcctcgcggacctggcgggctctacggcgggcgactacggcggcctcgtggtcttctgcatcttctttggcatctcctacggcatggtgggggccctgcagttcgaggtgctcatggccatcgtgggcacccacaagttctccagtgccattggcctggtgctgctgatggaggcggtggccgtgctcgtcgggcccccttcgggaggcaaactcctggatgcgacccacgtctacatgtacgtgttcatcctggcgggggccgaggtgctcacctcctccctgattttgctgctgggcaacttcttctgcattaggaagaagcccaaagagccacagcctgaggtggcggccgcggaggaggagaagctccacaagcctcctgcagactcgggggtggacttgcgggaggtggagcatttcctgaaggctgagcctgagaaaaacggggaggtggttcacaccccggaaacaagtgtctgagtggctgggcggggccggcaggcacagggaggaggtacagaagccggcaacgcttgctatttattttacaaactggactggctcaggcagggccacggctgggctccagctgccggcccagcggatcgtcgcccgatcagtgttttgagggggaaggtggcggggtgggaaccgtgtcattccagagtggatctgcggtgaagccaagccgcaaggttacaaggcatcctcaccaggggccccgcctgctgctcccaggtggcctgcggccactgctatgctcaaggacctggaaacccatgcttcgagacaacgtgactttaatgggagggtgggtgggccgcagacaggctggcagggcaggtgctgcgtggggccctctccagcccgtcctaccctgggctcacatggggcctgtgcccacccctcttgagtgtcttggggacagctctttccacccctggaagatggaaataaacctgcgtgtgggtggagtgttaggaccaacggtttccta

SEQ ID NO: 49 - DNA, 3263 bp, Homo sapiens
gggccgggtccgggagccccagggcagccgccccgccgagtcgcagtgtcgggggctgcggggtgtctcggggccctggggtgagtgcggggcgcgggccgaggtttgcagggccctgtgagcgcgcccaggcacgtgttgcttcgggacgggccagccggtgggtgaaccctgccagccacgcgtggggcgggcccctggcacatctccagaccattgtctcctgtgccagaagctttgtaggtgcaacttccccttggagcagctgtgggtgcggatccagcggacgaatcccgaggcgtctcagagagagcctggacagccgctggagcctttcccgagtgggtccttccaacaccgctacagcaggaaagccatccccctagggtcctgtccatcggaaactcctgtcctggggagtctgcctgcctggcctcaggacacaggccaactaagctggccccgaaatccagaatgcatccagagggaaggcacagcgtcaccttcgtcccctccggagctgcacgtggcctgagcaggatggtgccctccagcccagcggtggagaagcaggtgcccgtggaacctgggcctgaccccgagctccggtcctggcggcacctcgtgtgctacctttgcttctacggcttcatggcgcagatacggccaggggagagcttcatcaccccctacctcctggggcccgacaagaacttcacgcgggagcaggcatgtcacgaacgagatcacgccggtgctgtcgtactcctacctggccgtgctggtgcccgtgttcctgctcaccgactacctgcgctacacgccggtgctgctgctgcaggggctcagcttcgtgtcggtgtggctgctgctgctgctgggccactcggtggcgcacatgcagctcatggagctcttctacagcgtcaccatggccgcgcgcatcgcctattcctcctacatcttctctctcgtgcggcccgcgcgctaccagcgtgtggccggctactcgcgcgctgcggtgctgctgggcgtgttcaccagctccgtgctgggccagctgctggtcactgtgggccgagtctccttctccacgctcaactacatctcgctggccttcctcaccttcagcgtggtcctcgccctcttcctgaagcgccccaagcgcagcctcttcttcaaccgcgacgaccgggggcggtgcgaaacctcggcttcggagctggagcgcatgaatcctggcccaggcgggaagctgggacacgccctgcgggtggcctgtggggactcagtgctggcgcggatgctgcgggagctgggggacagcctgcggcggccgcagctgcgcctgtggtccctctggtgggtcttcaactcggccggctactacctggtggtctactacgtgcacatcctgtggaacgaggtggaccccaccaccaacagtgcgcgggtctacaacggcgcggcagatgctgcctccacgctgctgggcgccatcacgtccttcgccgcgggcttcgtgaagatccgctgggcgcgctggtccaagctgctcatcgcgggcgtcacggccacgcaggcggggctggtcttccttctggcgcacacgcgccacccgagcagcatctggctgtgctatgcggccttcgtgctgttccgcggctcctaccagttcctcgtgcccatcgccacctttcagattgcatcttctctgtctaaagagctctgtgccctggtcttcggggtcaacacgttctttgccaccatcgtcaagaccatcatcactttcattgtctcggacgtgcggggcctgggcctcccggtccgcaagcagttccagttatactccgtgtacttcctgatcctgtccatcatctacttcttgggggccatgctggatggcctgcggcactgccagcggggccaccacccgcggcagcccccggcccagggcctgaggagtgccgcggaggagaaggcagcacaggcactgagcgtgcaggacaagggcctcggaggcctgcagccagcccagagcccgccgctttccccagaagacagcctgggggctgtggggccagcctccctggagcagagacagagcgacccatacctggcccaggccccggccccgcaggcagctgaattcctgagcccagtgacaaccccttccccctgcactctgtgctccgcccaagcctcaggccctgaggctgcagatgagacttgtccccagctggctgtccatcctcctggtgtcagcaagctgggtttgcagtgtcttccaagcgacggtgttcagaatgtgaaccagtgactctcgggcgcccctgtggtaactttgcaggcggccctcagtgcatccccacgacccctgcctcgagggccgcctgccttagcaatgggggcctccgcttatcctgctagcaggccccctaggattccccctgccctgtgccgcactctggcggtggccacagcgtgctggcgacactcagggcagctgcctggccatgctgtccctgcactgtgccccgcgggctttgttgctggaagaggtgggtggtgggcttctgcgtccaccaggcctcactggctcatgccccttggggggcttgagacaaatcctttctgccccccagggctagtgaagtggcctcttggataccagctcaggggacactggccccacaggagttgtgagccctctagggcagggtgggagccgggaccctcaggtgtagctgagctgtgacattgctggtcatccttggtgctcttgcttttttgaaagatgctttttttttttttaactgacgtagaatgaagaactgcatgtggcttctctgtctctgtggaaaagccatctcaggttggcggcagacacattgtcatcagaggggagcagcggctctggtcctcggagctggttcctctctcccaccctaagggcagccctccatggtcctgtctgtccttctgaagtgtgtccatcctgacctgcgggtcctcagctgctcccacacttgtgccagcccggaggggactggtcccggtcaccgcggacgtgctggccttggtatgtgccaggcttgcctgggctgggcagccttgggggggctgcctttgtggtgggcgctggggaagtacgtcccagcggcctcagggtctaaggagcgctagtgccttgcccacaggtgcgggaccatctgatgtgatgtgaatactcttcccacatacattaaacacacttaagtgag

SEQ ID NO: 50 - DNA, 5758 bp, Homo sapiens
tttctgtactctgggtgactcagagagggaagagattcagccagcacactcctcgcgagcaagcattactctactgactggcagagacaggagaggtagatgtccacgcccacagaccctggtgcgatgccccacccagggccttcgccggggcctgggccttcccctgggccaattcttgggcctagtccaggaccaggaccatccccaggttccgtccacagcatgatggggccaagtcctggacctccaagtgtctcccatcctatgccgacgatggggtccacagacttcccacaggaaggcatgcatcaaatgcataagcccatcgatggtatacatgacaaggggattgtagaagacatccattgtggatccatgaagggcactggtatgcgaccacctcacccaggcatgggccctccccagagtccaatggatcaacacagccaaggttatatgtcaccacacccatctccattaggagccccagagcacgtctccagccctatgtctggaggaggcccaactccacctcagatgccaccaagccagccgggggccctcatcccaggtgatccgcaggccatgagccagcccaacagaggtccctcacctttcagtcctgtccagctgcatcagcttcgagctcagattttagcttataaaatgctggcccgaggccagcccctccccgaaacgctgcagcttgcagtccaggggaaaaggacgttgcctggcttgcagcaacaacagcagcagcaacagcagcagcagcagcagcagcagcagcagcagcagcagcaacagcagccgcagcagcagccgccgcaaccacagacgcagcaacaacagcagccggcccttgttaactacaacagaccatctggcccggggccggagctgagcggcccgagcaccccgcagaagctgccggtgcccgcgcccggcggccggccctcgcccgcgccccccgcagccgcgcagccgcccgcggccgcagtgcccgggccctcagtgccgcagccggccccggggcagccctcgcccgtcctccagctgcagcagaagcagagccgcatcagccccatccagaaaccgcaaggcctggaccccgtggaaattctgcaagagcgggaatacagacttcaggcccgcatagctcataggatacaagaactggaaaatctgcctggctctttgccaccagatttaagaaccaaagcaaccgtggaactaaaagcacttcggttactcaatttccagcgtcagctgagacaggaggtggtggcctgcatgcgcagggacacgaccctggagacggctctcaactccaaagcatacaaacggagcaagcgccagactctgagagaagctcgcatgaccgagaagctggagaagcagcagaagattgagcaggagaggaaacgccgtcagaaacaccaggaatacctgaacagtattttgcaacatgcaaaagattttaaggaatatcatcggtctgtggccggaaagatccagaagctctccaaagcagtggcaacttggcatgccaacactgaaagagagcagaagaaggagacagagcggattgaaaaggagagaatgcggcgactgatggctgaagatgaggagggttatagaaaactgattgatcaaaagaaagacaggcgtttagcttaccttttgcagcagaccgatgagtatgtagccaatctgaccaatctggtttgggagcacaagcaagcccaggcagccaaagagaagaagaagaggaggaggaggaagaagaaggctgaggagaatgcagagggtggggagtctgccctgggaccggatggagagcccatagatgagagcagccagatgagtgacctccctgtcaaagtgactcacacagaaaccggcaaggttctgttcggaccagaagcacccaaagcaagtcagctggacgcctggctggaaatgaatcctggttatgaagttgcccctagatctgacagtgaagagagtgattctgattatgaggaagaggatgaggaagaagagtccagtaggcaggaaaccgaagagaaaatactcctggatccaaatagcgaagaagtttctgagaaggatgctaagcagatcattgagacagctaagcaagacgtggatgatgaatacagcatgcagtacagtgccaggggctcccagtcctactacaccgtggctcatgccatctcggagagggtggagaaacagtctgccctcctaattaatgggaccctaaagcattaccagctccagggcctggaatggatggtttccctgtataataacaacttgaacggaatcttagccgatgaaatggggcttggaaagaccatacagaccattgcactcatcacttatctgatggagcacaaaagactcaatggcccctatctcatcattgttcccctttcgactctatctaactggacatatgaatttgacaaatgggctccttctgtggtgaagatttcttacaagggtactcctgccatgcgtcgctcccttgtcccccagctacggagtggcaaattcaatgtcctcttgactacttatgagtatattataaaagacaagcacattcttgcaaagattcggtggaaatacatgatagtggacgaaggccaccgaatgaagaatcaccactgcaagctgactcaggtcttgaacactcactatgtggcccccagaaggatcctcttgactgggaccccgctgcagaataagctccctgaactctgggccctcctcaacttcctcctcccaacaatttttaagagctgcagcacatttgaacaatggttcaatgctccatttgccatgactggtgaaagggtggacttaaatgaagaagaaactatattgatcatcaggcgtctacataaggtgttaagaccatttttactaaggagactgaagaaagaagttgaatcccagcttcccgaaaaagtggaatatgtgatcaagtgtgacatgtcagctctgcagaagattctgtatcgccatatgcaagccaaggggatccttctcacagatggttctgagaaagataagaaggggaaaggaggtgctaagacacttatgaacactattatgcagttgagaaaaatctgcaaccacccatatatgtttcagcacattgaggaatcctttgctgaacacctaggctattcaaatggggtcatcaatggggctgaactgtatcgggcctcagggaagtttgagctgcttgatcgtattctgccaaaattgagagcgactaatcaccgagtgctgcttttctgccagatgacatctctcatgaccatcatggaggattattttgcttttcggaacttcctttacctacgccttgatggcaccaccaagtctgaagatcgtgctgctttgctgaagaaattcaatgaacctggatcccagtatttcattttcttgctgagcacaagagctggtggcctgggcttaaatcttcaggcagctgatacagtggtcatctttgacagcgactggaatcctcatcaggatctgcaggcccaagaccgagctcaccgcatcgggcagcagaacgaggtccgggtactgaggctctgtaccgtgaacagcgtggaggaaaagatcctcgcggccgcaaaatacaagctgaacgtggatcagaaagtgatccaggcgggcatgtttgaccaaaagtcttcaagccacgagcggagggcattcctgcaggccatcttggagcatgaggaggaaaatgaggaagaagatgaagtaccggacgatgagactctgaaccaaatgattgctcgacgagaagaagaatttgacctttttatgcggatggacatggaccggcggagggaagatgcccggaacccgaaacggaagccccgtttaatggaggaggatgagctgccctcctggatcattaaggatgacgctgaagtagaaaggctcacctgtgaagaagaggaggagaaaatatttgggagggggtcccgccagcgccgtgacgtggactacagtgacgccctcacggagaagcagtggctaagggccatcgaagacggcaatttggaggaaatggaagaggaagtacggcttaagaagcgaaaaagacgaagaaatgtggataaagatcctgcaaaagaagatgtggaaaaagctaagaagagaagaggccgccctcccgctgagaaactgtcaccaaatccccccaaactgacaaagcagatgaacgctatcatcgatactgtgataaactacaaagataggtgtaacgtggagaaggtgcccagtaattctcagttggaaatagaaggaaacagttcagggcgacagctcagtgaagtcttcattcagttaccttcaaggaaagaattaccagaatactatgaattaattaggaagccagtggatttcaaaaaaataaaggaaaggattcgtaatcataagtaccggagcctaggcgacctggagaaggatgtcatgcttctctgtcacaacgctcagacgttcaacctggagggatcccagatctatgaagactccatcgtcttacagtcagtgtttaagagtgcccggcagaaaattgccaaagaggaagagagtgaggatgaaagcaatgaagaggaggaagaggaagatgaagaagagtcagagtccgaggcaaaatcagtcaaggtgaaaattaagctcaataaaaaagatgacaaaggccgggacaaagggaaaggcaagaaaaggccaaatcgaggaaaagccaaacctgtagtgagcgattttgacagcgatgaggagcaggatgaacgtgaacagtcagaaggaagtgggacggatgatgagtgatcagtatggacctttttccttggtagaactgaattccttcctcccctgtctcatttctacccagtgagttcatttgtcatataggcactgggttgtttctatatcatcatcgtctataaactagctttaggatagtgccagacaaacatatgatatcatggtgtaaaaaacacacacatacacaaatatttgtaacatattgtgaccaaatgggcctcaaagattcagattgaaacaaacaaaaagcttttgatggaaaatatgtgggtggatagtatatttctatgggtgggtctaatttggtaacggtttgattgtgcctggttttatcacctgttcagatgagaagatttttgtcttttgtagcactgataaccaggagaagccattaaaagccactggttattttatttttcatcaggcaattttcgaggtttttatttgttcggtattgtttttttacactgtggtacatataagcaactttaataggtgataaatgtacagtagttagatttcacctgcatatacatttttccattttatgctctatgatctgaacaaaagctttttgaattgtataagatttatgtctactgtaaacattgcttaatttttttgctcttgatttaaaaaaaagttttgttgaaagcgctattgaatattgcaatctatatagtgtattggatggcttcttttgtcaccctgatctcctatgttaccaatgtgtatcgtctccttctccctaaagtgtacttaatctttgctttctttgcacaatgtctttggttgcaagtcataagcctgaggcaaataaaattccagtaatttcgaagaatgtggtgttggtgctttcctaataaagaaataatttagcttgacaaaa

SEQ ID NO: 51 - DNA, 3307 bp, Homo sapiens
cctgcgtcccgagtgcgcggcggccggaccgggcgggcggagccgggcccgcggggctgctgcggggcgatcgggccgggccgctgccgcgccatggactcccgtgtccagcctgagttccagcctcactgagtggccacccccaaagtgctgccagccgaggaagcccccagcactgaccatgtctattatggaccacagccccaccacgggcgtggtcacagtcatcgtcatcctcattgccatcgcggccctgggggccttgatcctgggctgctggtgctacctgcggctgcagcgcatcagccagtcagaggacgaggagagcatcgtgggggatggggagaccaaggaacccttcctgctggtgcagtattcggccaagggaccgtgcgtggagagaaaggccaagctgatgactcccaacggcccggaagtccacggctgagccaggatgcaaggctcctggtcctgtttgcagccggccaagaggcgctgggaggggcaaaaccatacggatgcgctgctgtctgagaggaagggctgacacttgctggcatggcctctgcgggcttcgtcatcgcatgcactgatgcccggggacctggctgtcctgggcttcccctcggcctccaggtgaggctgcccattgcaggcactgggcaggcctgaccttgctggggctcatggccctgtagcgcttttgttacttgaatgtctagctgagcctgtttttgatggagctactactgtaatgcgtgaactaacaaacctgtgaactgtaaataggcccctggaagcacgtgcttaagcccttttgctgatttttaaaaatatcatctagcgcacacgggactggtattctggctgtactaatgacaagctgagtcaagaccctggagggtcataggcttgtaaaggcccacgccacactcggcaggggtctctcatgtgtgtccatctgcgtgtatgtcaaggaagtgagatgccaatttggggtcttgaggctgaccagttggggtgcttgggtgatctctgcttcattagtcatgggtggaagaaaaaccacaccccccgcacccctccgttctttctgcatagactcacttgttaaatagcagttctgttgagagtggagttactgcagggaagctaccggacctgcctgggagccagtgaagggcgagtcagggcacgcgtcctggaggctgccagcgtccttgtagcagagcagtttcttgccgcttgggtcttcagcacgccaagccccccaccaaccctccaccccgagtgaaggcttcgctgaaattgctttggtcctcatagagcctgtggtggctacttttggtctgaaacccacttggcccaggaaagagaaaaggttgtatgttttgtgttggtgtttcctattttctgcactggaggggaggggactgttgaggttctgtcttttttcttcttttcctcttccctcttcacatcacttggcttcctttcctctctgatgaccgtccgcctatggggttctgacttcactttcctcagcgggtctccagtcccctgacccagctctaaaggcacttaggacccagggaacatttctcacgtgcacattcccctaagagccaccagactgcttcctgccagcctgtgcttgcggcagggagccggggcagggcagaggtgaacttgaagttcaggacttgactctcccacaggtggtgagctggtggctctctggtgagctagtgtctccacagcctgtctccaaggcctcccctatgtacatttcagtgagctcactttgatttttaatcccaccacaagcacatactaattttatttatgattcaaatgtgactcgtgcctgcccatccctgtaatagatggaaggtcagccccggcttaaccacagagcactggcccttcatggctgagctcagagctctggcctcctgctcagactaaaggcacctcctctggcctcacccaagcctcttctaaaaaccatgttgaatgaatccacgttctggaaccccgaggcgggagaagtagggagctgttcgtttaagcagcatacacctaaattgggggtttaaacattaagtaggagcttggggtggaagagggacagccggctgggccacctgagcagaaggtggtaatgaaacacctcagctgggctcttgggagaccttaggaagcaggagaggcaacacctctggctactgatggtgtggcaagttcagaagaggtggtggtggggtaggcgtgatgtcagcagaagccctgcaggctgggtgggcaggacacgtggtgggggccactgaaaccaggcctaggagggagaacaagttccaaaggtgccgactggaagaagggggtaaaagtttgctttggtgagtgagaaaaggctggggcgtgtgatccatcccctcacgtttcagaacttccaggctttctacctcgactctcaccacagccagcacatacacctaggctgtttttccttcctccacacctgagggacgcagcaacagctaggatctgcattttcaggttccgagcctgacccctggaactgaccagcgctcgattgtcagccttggcctggggttttgaccttgccagtgaagtttcggttttgaagtgattaaatgtcacttcctcatcagtttcacttctggaggttttcttatcctactccctggtgccagggacgtacctgggagtttgaatcaggcccatttgagcgtggcagccgtgttgggtgaaggtccggggctcggtgaggcactgggggggttttcgggaggaaaatgaaaatgcttctagaatgagtgaaccacatcatagctctcactgttttttcaatagctactttttttagcagacaccagagccacactcaaatggctaagtaggttatgacctctctggattatttttgaatgcccaactgttgcattcaagttttctgactaataagaaattaagcattcatccttcgtatcactgcagaagcaacagtgggggcacagggagggaactcttgacactgagccactaaaatatggactaattttttggacaaatcttcaaacggactgtgctactgtatttgtctcaaagctaccaagtttgtgcaataagtggaagggatgtcatccttcttcaataaatgctgaatgacattcaagctgattttctagaccactgagaaaatctttatttacaataaatttcaataaaatttgcataaatatattcccaaaaaaaaaaaaaaaaaaaaagaaaaaaaaaaaaa

SEQ ID NO: 52 - DNA, 7226 bp, Homo sapiens
agcagttcagagccccagttgcagacgacttgtcctgccaccaccatgagttctgaatgtgatggtggttccaaagctgtgatgaatggcttggcacctggcagcaatgggcaagacaaagcaactgccgaccctttacgcgcacgctctatttctgctgttaaaatcattcctgtgaagacagtgaaaaacgcctcaggcctagttctccctacagacatggatcctacaaaaatctgcactgggaagggagcggtgactctccgggcctcgtcttcctacagggaaaccccaagcagtagccctgcgagccctcaggaaacccggcaacacgaaagcaaaccaggtctggagccagagccttcttcagcagatgagtggaggctttcttccagtgctgatgccaatggaaatgcccagccctcttcactcgctgccaagggctacagaagtgtgcatcccaaccttccttctgacaagtcccaggatgccacttcctccagtgcagcccagccggaggtaatagttgtccctctctacctggttaatactgacagagggcaagaaggcactgccagacctccaacacctctggggcctcttggctgcgtccccacaatcccagcgactgcctctgccgcctcacctctgaccttcccgactctagatgatttcattccccctcatctgcagaggtggccccaccacagccagccagcccgcgcctctggctcctttgcccccattagccagacgccaccatccttctcaccaccacctccgctggtccctcctgccccggaggacctccgcagagtctcggagcctgacctcacgggagctgtttcgagtaccgattccagtcctctactaaatgaagtttcttcttcccttattggaactgattcccaagcctttccatcagttagcaagccttcatccgcctatccctccacaacgattgtcaatcctactattgtgctcttgcaacacaatcgagaacagcaaaaacgactcagtagcctttcagatcctgtctcagaaagaagagtgggagagcaggactcagcaccaacccaggaaaaacccacctcacctggcaaggctattgaaaaaagagcaaaggatgacagtaggcgggtggtgaagagcactcaggacttaagcgatgtttccatggatgaagtgggcatcccactccggaacactgagagatcaaaagactggtacaagactatgtttaaacagatccacaaactgaacagagacactcctgaagaaaacccttatttccctacgtacaaattccctgaacttcctgaaatccagcaaacttccgaagaggacaatccttacactcccacctaccagtttcctgcatctactcctagtcctaaatctgaagatgatgattcagatctgtactctcccagatactcattttctgaagacacaaaatctcccctttctgtgcctcgctcaaaaagtgagatgagctacattgatggtgagaaggtagtcaagaggtcggccacactacccctcccagcccgctcttcctcactgaagtcaagctcagaaagaaatgactgggaacccccagataagaaagtagacacaagaaaatatcgtgcagagcccaagagcatttacgaatatcagcctggcaagtcttccgttctgaccaacgaaaagatgagtcgggatataagcccagaagagatagatttaaagaatgaaccttggtataaattcttttcggaattggagtttgggaaaccgcctcccaaaaagatatgggattatactcctggagactgctctatccttcctagagaggatagaaagactaatctagacaaagatctcagcctctgccagacagagttagaggcagatttagaaaaaatggagacgcttaataaagcacccagtgcaaacgtgccacagagctcagccatcagccctactccggaaatttcttcagagactcctggatatatatattcttccaacttccatgcagtgaagagggaatcagacggggctcctggggatctcactagcttggagaatgagagacaaatttataaaagtgtcttggaaggtggtgacatccctcttcagggcctgagtgggctcaagcgaccatccagctctgcttccactaaagattcagaatcgccaagacattttataccagctgattacttggaatccacggaagaatttattcgaagacgtcatgatgataaagagaaacttttagcggaccagagacgacttaaacgcgagcaagaagaggctgatattgcagctcgacgccacacaggcgtcattccgacgcaccatcagtttatcactaatgagcgctttggggacctcctcaatatagacgatactgcaaaaaggaaatctgggtcagagatgagacctgccagagccaaatttgactttaaagctcagacactaaaggagcttcctctgcagaagggagatattgtttacatttataagcaaattgatcagaactggtatgaaggagaacaccacggccgggtgggaatcttcccacgcacctacatcgagcttcttcctcctgctgagaaggcacagcccaaaaagttgacaccagtgcaggttttggaatatggagaagctattgctaagtttaactttaatggtgatacacaagtagaaatgtccttcagaaagggtgagaggatcacactgctccggcaggtagatgagaactggtacgaagggaggatcccggggacatcccgacaaggcatcttccccatcacctacgtggatgtgatcaagcgaccactggtgaaaaaccctgtggattacatggacctgcctttctcctcctccccaagtcgcagtgccactgcaagcccacagttttccagtcacagcaagctcatcacgccagccccctcatctctgccccactcccgccgagccctgtcccccgagatgcacgctgtcacctctgagtggatctcactgactgtgggggtcccaggcaggcgttctctggccctgaccccacccttgcctcctctgccagaggcttctatctataacactgaccacctcgccttgtcaccaagggccagtccctccctgtctctcagcctcccccatttgagttggtcagatcgtcccaccccacgatcagtagcttctccactggccctaccttccccacacaaaacctactccctagcacctacttcccaggcctcccttcacatgaatggagacggtggtgtccacacgccatcttcaggcatccaccaagatagcttcttgcagctgccgctggggagctctgatagtgtcatctcccagcttagtgatgcctttagcagccagagcaagaggcagccatggcgcgaagagagtggacaatatgagaggaaagcagagaggggggcaggcgaaagaggccctggtggacccaagatctctaagaagagctgcttgaagccttcagacgtggtcaggtgcctgagtactgaacagagactctcagatctcaacacccctgaggagagccggcccggcaagcccctgggtagcgcttttccaggaagtgaggctgagcagacagagcggcatagaggtggcgagcaggcggggaggaaagctgctcggagaggtgggagccagcaacctcaagcccagcagcgaagagtcacccccgacaggagtcaaacctcacaagatttatttagctatcaagcattatatagctatataccacagaatgatgatgagttggaactccgcgatggagatatcgttgatgtcatggaaaaatgtgacgatggatggtttgttggtacttcaagaaggacaaagcagtttggtacttttccaggcaactatgtaaaacctttgtatctataagaagactgaaaaccatggagattatttttattggaggaggaagcatcattcatgaaccgatctttttagttgagtcagtaggaaaattaatacagtggataaagtaagaagcaaaagacagggacagagaagtgttgtgtttaaaacccaagcctgtctaaggttactgtgtattagacagggccgaactagtgtgctgagcaaaaagaattgaagcaaattgtatttacttagccgcttctgggagccacttcagcctttcccctcccctccacttcttgggtaatctgacctgaagcatagtccaggagcagagttagccagaaatgcctcctgctgccccagccttagagagctcccatctcaatcattgagcctgaaggcttcaagcccaagaatgcaacaagacccccagcctacatttctcagctcccctggagccagctgatcctgtaacgctgctggaggtcagtctgagctaccaagactgtccctagacaaaggtggagtcccccacactgcccaagaccaaatccctcactcaacctgctgaggtgtggatggggaaacagaggcaaaactgaggcacctgatgcattcagcctgctgtgcagcagtgccattgactgccctgatgttcagagagaaacgcacacaaggtttgcccatgagaattggggagcagatggccaagcagataggttatgtctgttttctgagtgatgaagtcaggaagccctgtggctctggaggccacttgtggttcattcttttcccatatccttggcttttagaaatggttaccttcaggacagtgcagctgcatttatcagagcactattgctaagttttcttttctggcttgtgtttttctgggacagtttagaattgggaggcctattctcatagaacaccaaaaatgatgttcagtgattcatttaacatacaccaatgtactctggctgctggggggacaaccataagcaagacatgcccagggtttgccgtggctccagatctactccctgtaggagttcaaggatcacacaaacggtagtaaccagggttgtgaatctgagtacaccctggcaaggcttctcttcagactgaagcagcaattctgccactaccagcagcaaccaggacgtctgttctttgtgggggccagatcagaagagagaggcccctgtgacgcccgggctgcttggtcacaactctgtccaattcaaggatgtttatcggcctctcttagatcctgagtgagacaaatacagaaatgacccattccctgcccaccagaaactcagaggtgattggggagactgacacaggaaaatgaacttaatcaagagagactgtgatatgtgctaagaagggtgtgagggagggagagatgaattttccctggagggatcctagaaagcattgtcatattgccatctccattagctcacttttaaacaactagggtgctggaagaacctttgtctgagggtagttcatagctggaaatacttggaatattttccagagtctctaaactctcatcttcccccacagatacacatccaagctcacaaataggagtagcaattctaggtggtagggttgtgtacggaacccctggctgtctgcatatatctcagaattaccccaggaccattgtcccaaagtctagagtctttacaggtaggcaaaatttgttttcaatgcctgtgcctcagctgctgtcacaaatacccatcttaggatcccatcagcttcccatcccccaccagacagccacagtaccctcactttctccctattgttctttcaaatcctgttctcaggaaagaaactgccactaattcattcacactaaggtgtaaatgattgataataggaatgagttacctcttcccacagacatttgtttttaagtatgacagagcagggccttaatcccaagggaaaaggttatggaactggagggggtgagctttctgggtagaaggagacttcctgaatttccttaaaacccagtaagagtaagacctgttgttttggaaggtctgctccaccatctaagagcactgtttttttttttttgttgttgttgttgttttacggtctctgagggaatatagtaaaaatgcatatgcacgtgcaatttgcacggcagcatttcaccgattgtggactgtattggctaatgtgtttcctggtctttagatgcaaaccattaataacactatcttatctcatagttttttcaggggtgcttcttgattagtagggaattttgaacacctctttaaatacagctagaaaataaaaccaatttgtaaagccacatttgcatatgatgccagcctcacgcatttgtatatctccagaaattcaggtatgcctcaccaatttgcccgtctttaataaaatcttgtgttaaaatttgcatcacgtcgccttcctatgtatgacgaaacaagaaacagagatttccaattgctcttttgtcttcagacatttagtaatataaagtacctatttttatgctgaaatgtttatacaggtttattaatagcaagtgcaactaactggcggcatgccttgcaacacattttgatatattagccatgcttccgggtaaaggcaagccccaaactccttatcttttgcagtctctctgggatcagtaaaagaaaaaaaaaataatgtgcttaagaagtgggactgtaaatatgtatatttaactttgtatagcccatgtacctaccttgtatagaaaaataattttaaaaatttgaatggaagggggtaaaggaagtcatgaagtttttttgcatttttatttaaatgaaggaattccaaataactcacctacagatttttagcacaaaaatagccattgtaaagtgttaaaatttacgataagtattctattggggaggaaaggtaactctgatctcagttacagtttttttttcctttttaatttcattattttgggtttttggtttttgcagtcctatttatctgcagtcgtattaagtcctattgctagaataggttactacaaaaaaggttatattctgaaagaaaaataactgacattatatataaccaattaatttaaagtattgccatttaaattacacactgagagcatgtcctatgcagacatagatttttctgttcatttatttttcttcattgcagtggattgatttgataaatagatgtgttgaattactacatttgctgtacatattatttaataaactttattcagaattgcgtggcaaaaaaaaaaaaaaaaa

SEQ ID NO: 53 - DNA, 5010 bp, Homo sapiens
ggcggctcgggacggaggacgcgctagtgtgagtgcgggcttctagaactacaccgaccctcgtgtcctcccttcatcctgcggggctggctggagcggccgctccggtgctgtccagcagccatagggagccgcacggggagcgggaaagcggtcgcggccccaggcggggcggccgggatggagcggggccgcgagcctgtggggaaggggctgtggcggcgcctcgagcggctgcaggttcttctgtgtggcagttcagaatgatggatcaagctagatcagcattctctaacttgtttggtggagaaccattgtcatatacccggttcagcctggctcggcaagtagatggcgataacagtcatgtggagatgaaacttgctgtagatgaagaagaaaatgctgacaataacacaaaggccaatgtcacaaaaccaaaaaggtgtagtggaagtatctgctatgggactattgctgtgatcgtctttttcttgattggatttatgattggctacttgggctattgtaaaggggtagaaccaaaaactgagtgtgagagactggcaggaaccgagtctccagtgagggaggagccaggagaggacttccctgcagcacgtcgcttatattgggatgacctgaagagaaagttgtcggagaaactggacagcacagacttcaccagcaccatcaagctgctgaatgaaaattcatatgtccctcgtgaggctggatctcaaaaagatgaaaatcttgcgttgtatgttgaaaatcaatttcgtgaatttaaactcagcaaagtctggcgtgatcaacattttgttaagattcaggtcaaagacagcgctcaaaactcggtgatcatagttgataagaacggtagacttgtttacctggtggagaatcctgggggttatgtggcgtatagtaaggctgcaacagttactggtaaactggtccatgctaattttggtactaaaaaagattttgaggatttatacactcctgtgaatggatctatagtgattgtcagagcagggaaaatcacctttgcagaaaaggttgcaaatgctgaaagcttaaatgcaattggtgtgttgatatacatggaccagactaaatttcccattgttaacgcagaactttcattctttggacatgctcatctggggacaggtgacccttacacacctggattcccttccttcaatcacactcagtttccaccatctcggtcatcaggattgcctaatatacctgtccagacaatctccagagctgctgcagaaaagctgtttgggaatatggaaggagactgtccctctgactggaaaacagactctacatgtaggatggtaacctcagaaagcaagaatgtgaagctcactgtgagcaatgtgctgaaagagataaaaattcttaacatctttggagttattaaaggctttgtagaaccagatcactatgttgtagttggggcccagagagatgcatggggccctggagctgcaaaatccggtgtaggcacagctctcctattgaaacttgcccagatgttctcagatatggtcttaaaagatgggtttcagcccagcagaagcattatctttgccagttggagtgctggagactttggatcggttggtgccactgaatggctagagggatacctttcgtccctgcatttaaaggctttcacttatattaatctggataaagcggttcttggtaccagcaacttcaaggtttctgccagcccactgttgtatacgcttattgagaaaacaatgcaaaatgtgaagcatccggttactgggcaatttctatatcaggacagcaactgggccagcaaagttgagaaactcactttagacaatgctgctttccctttccttgcatattctggaatcccagcagtttctttctgtttttgcgaggacacagattatccttatttgggtaccaccatggacacctataaggaactgattgagaggattcctgagttgaacaaagtggcacgagcagctgcagaggtcgctggtcagttcgtgattaaactaacccatgatgttgaattgaacctggactatgagaggtacaacagccaactgctttcatttgtgagggatctgaaccaatacagagcagacataaaggaaatgggcctgagtttacagtggctgtattctgctcgtggagacttcttccgtgctacttccagactaacaacagatttcgggaatgctgagaaaacagacagatttgtcatgaagaaactcaatgatcgtgtcatgagagtggagtatcacttcctctctccctacgtatctccaaaagagtctcctttccgacatgtcttctggggctccggctctcacacgctgccagctttactggagaacttgaaactgcgtaaacaaaataacggtgcttttaatgaaacgctgttcagaaaccagttggctctagctacttggactattcagggagctgcaaatgccctctctggtgacgtttgggacattgacaatgagttttaaatgtgatacccatagcttccatgagaacagcagggtagtctggtttctagacttgtgctgatcgtgctaaattttcagtagggctacaaaacctgatgttaaaattccatcccatcatcttggtactactagatgtctttaggcagcagcttttaatacagggtagataacctgtacttcaagttaaagtgaataaccacttaaaaaatgtccatgatggaatattcccctatctctagaattttaagtgctttgtaatgggaactgcctctttcctgttgttgttaatgaaaatgtcagaaaccagttatgtgaatgatctctctgaatcctaagggctggtctctgctgaaggttgtaagtggttcgcttactttgagtgatcctccaacttcatttgatgctaaataggagataccaggttgaaagacctctccaaatgagatctaagcctttccataaggaatgtagcaggtttcctcattcctgaaagaaacagttaactttcagaagagatgggcttgttttcttgccaatgaggtctgaaatggaggtccttctgctggataaaatgaggttcaactgttgattgcaggaataaggccttaatatgttaacctcagtgtcatttatgaaaagaggggaccagaagccaaagacttagtatattttcttttcctctgtcccttcccccataagcctccatttagttctttgttatttttgtttcttccaaagcacattgaaagagaaccagtttcaggtgtttagttgcagactcagtttgtcagactttaaagaataatatgctgccaaattttggccaaagtgttaatcttaggggagagctttctgtccttttggcactgagatatttattgtttatttatcagtgacagagttcactataaatggtgtttttttaatagaatataattatcggaagcagtgccttccataattatgacagttatactgtcggttttttttaaataaaagcagcatctgctaataaaacccaacagatactggaagttttgcatttatggtcaacacttaagggttttagaaaacagccgtcagccaaatgtaattgaataaagttgaagctaagatttagagatgaattaaatttaattaggggttgctaagaagcgagcactgaccagataagaatgctggttttcctaaatgcagtgaattgtgaccaagttataaatcaatgtcacttaaaggctgtggtagtactcctgcaaaattttatagctcagtttatccaaggtgtaactctaattcccatttgcaaaatttccagtacctttgtcacaatcctaacacattatcgggagcagtgtcttccataatgtataaagaacaaggtagtttttacctaccacagtgtctgtatcggagacagtgatctccatatgttacactaagggtgtaagtaattatcgggaacagtgtttcccataattttcttcatgcaatgacatcttcaaagcttgaagatcgttagtatctaacatgtatcccaactcctataattccctatcttttagttttagttgcagaaacattttgtggtcattaagcattgggtgggtaaattcaaccactgtaaaatgaaattactacaaaatttgaaatttagcttgggtttttgttacctttatggtttctccaggtcctctacttaatgagatagcagcatacatttataatgtttgctattgacaagtcattttaatttatcacattatttgcatgttacctcctataaacttagtgcggacaagttttaatccagaattgaccttttgacttaaagcagagggactttgtatagaaggtttgggggctgtggggaaggagagtcccctgaaggtctgacacgtctgcctacccattcgtggtgatcaattaaatgtaggtatgaataagttcgaagctccgtgagtgaaccatcatataaacgtgtagtacagctgtttgtcatagggcagttggaaacggcctcctagggaaaagttcatagggtctcttcaggttcttagtgtcacttacctagatttacagcctcacttgaatgtgtcactactcacagtctctttaatcttcagttttatctttaatctcctcttttatcttggactgacatttagcgtagctaagtgaaaaggtcatagctgagattcctggttcgggtgttacgcacacgtacttaaatgaaagcatgtggcatgttcatcgtataacacaatatgaatacagggcatgcattttgcagcagtgagtctcttcagaaaacccttttctacagttagggttgagttacttcctatcaagccagtacgtgctaacaggctcaatattcctgaatgaaatatcagactagtgacaagctcctggtcttgagatgtcttctcgttaaggagtagggccttttggaggtaaaggtata

SEQ ID NO: 54 - DNA, 10276 bp, Homo sapiens
ctcagttgctcccagcagtggccctgggaccagctctgctccttgcaccccgctccctgcctggacacaggctcactcgctgccttcttctgggggaaaccagcttcttgccagccacagctgctgcctccgccactggccaccgcccctgtcctgggagtcccttggcccagacacccacctgacttagtggctcctctgcaggaaaggtggctgccccctgcgttcctccatccaaccatgagctggtgcccatcaccactgagaatgcaccaaagaatgtagtggacaagggagaaggagcctcccggggtggaaacacacggaaaagcctcgaggacaacggctccaccagggtcaccccgagtgtccagccccacctccagcccatcagaaacatgagtgtgagccggaccatggaggacagctgtgagctggacctggtgtacgtcacagagaggatcatcgctgtctccttccccagcacagccaatgaggagaacttccggagcaacctccgtgaggtggcgcagatgctcaagtccaaacatggaggcaactacctgctgttcaacctctctgagcggagacctgacatcacgaagctccatgccaaggtactggaatttggctggcccgacctccacaccccagccctggagaagatctgcagcatctgtaaggccatggacacatggctcaatgcagaccctcacaatgtcgttgttctacacaacaagggaaaccgaggcaggataggagttgtcatcgcggcttacatgcactacagcaacatttctgccagtgcggaccaggctctggaccggtttgcaatgaagcggttctatgaggataagattgtgcccattggccagccatcccaaagaaggtacgtgcattacttcagtggcctgctctccggctccatcaaaatgaacaacaagcccttgtttctgcaccacgtgatcatgcacggcatccccaactttgagtctaaaggaggatgtcggccatttctccgcatctaccaggccatgcaacctgtgtacacatctggcatctacaacatcccaggagacagccagactagcgtctgcatcaccatcgagccaggactgctcttgaagggagacatcttgctgaagtgctaccacaagaagttccgaagcccagcccgagacgtcatcttccgtgtgcagttccacacctgtgccatccatgacctgggggttgtctttgggaaggaggaccttgatgatgctttcaaagatgatcgatttccagagtatggcaaagtggagtttgtattttcttatgggccagagaaaattcaaggcatggagcacctggagaacgggccgagcgtgtctgtggactataacacctccgaccccctcatccgctgggactcctacgacaacttcagtgggcatcgagatgacggcatggaggaggtggtgggacacacgcaggggccactagatgggagcctgtatgctaaggtgaagaagaaagactccctgcacggcagcaccggggctgttaatgccacacgtcctacactgtcggccacccccaaccacgtggaacacacgctttctgtgagcagcgactcgggcaactccacagcctccaccaagaccgacaagaccgacgagcctgtccccggggcctccagtgccactgctgccttgagtccccaggagaagcgggagctggaccgcctgctgagtggctttggcttagagcgagagaagcaaggcgccatgtaccacacccagcacctcaggtcccgcccagcagggggctcggctgtgccctcctctggacgccacgttgtcccagcccaggttcatgtcaatggtggggcgttagcatctgagcgggagacagacatcctggacgatgaattgccaaaccaggatggtcacagtgcgggcagcatgggcacactctcttctctggacggggtcaccaacaccagtgaggggggctacccagaggccctgtccccactgaccaacggtctggacaagtcctaccccatggagcctatggtcaatggaggaggctacccctacgagtctgccagccgggcggggcctgcccatgctggccacacggcccccatgcggccctcctactctgcacaggagggtttagctggctaccagagggaggggccccacccagcctggccacagccagtgaccacctcccactatgcccatgaccccagcggtatgttccgctctcaatccttttcggaagctgaaccccagctgcccccagctccggtccgagggggaagcagccgggaggctgtgcaaaggggactgaattcgtggcagcagcagcagcagcagcagcagcagcctcgcccacctccacgccagcaggaaagagcccacttggagagtcttgtagccagcaggcccagccctcagccattggcagagacccccatccccagtctccctgagttcccgcgagcagcctcccagcaggagattgaacagtccatcgaaacactcaatatgctgatgctggacctggagccagcctccgctgctgccccactacacaagtcccagagtgtccccggggcctggccaggggcttctccactctcctcccagcccctctctggatcctcccgtcagtcccatccactgacccagtccagatctggctatatccccagtgggcattcgttgggaacccctgagccagccccacgggcctctctggagtctgtccctcctggcaggtcttactcaccttatgactatcagccatgtttggctgggcctaaccaggatttccattcaaagagcccagcctcttcctccttgcctgccttccttccgaccacccacagccctccagggcctcagcaacccccagcctctctccctggcctcactgctcagcctctgctctcaccaaaggaagcgacttcagacccctcccggactccagaggaggagccattgaatttagaagggctggtggcccacagggtagcaggggtacaggctcgggagaagcagcctgcagagcccccagcccctctgcggaggcgggcggccagtgatggacagtatgagaaccagtctccagaagccacatcccctcgtagccctggggttcgctcccctgtccagtgtgtctccccggagctggctcttaccatcgctctcaatcctggagggcggcccaaagagccccatttgcacagctacaaggaggccttcgaggagatggagggaacctccccgagcagcccaccacccagtggggtgcggtcccccccgggtctggccaagacacccctgtctgctctgggcctgaaacctcacaacccagcggacatcctgttgcaccccacaggagttaccagaagacggatccagccagaggaagatgaggggaaggtggtggtcaggctgtcagaagagccccggagctatgtggagtctgtggcacggacagcggtggctggaccccgagctcaggactctgagcccaagagctttagtgctccagccacccaggcctatggccatgagatacccctgaggaacgggaccctgggtggctcctttgtctcccccagccccctctccaccagcagccccatcctcagtgctgacagcacttcagtggggagtttcccgtcgggagagagcagtgaccagggtccccggacgcccacccagcctctgttggagtctggcttccgctcaggcagcctgggacagcccagcccgtctgcccagagaaactaccagagctcttctcctctcccgactgtgggcagtagctacagcagccccgactactcacttcagcatttcagctcctctccggaaagccaggctcgagctcagttcagtgtggctggcgtccacacggtgcctgggagccctcaggcgcgccacagaacagtgggcaccaacactccccctagtcctggcttcggctggcgggccatcaatcccagcatggctgcccccagcagtcccagtttgagccatcaccagatgatgggtccaccaggcactggcttccatggtagcactgtctccagcccccagagcagtgcagcgaccaccccggggagccccagcctgtgtcggcacccagcaggggtctaccaggtttctggcctccacaacaaagtggccaccaccccggggagtcccagcctgggccggcaccctggggctcaccaaggcaacctggcctccggtcttcatagcaatgcaatagccagccctggaagccccagcctgggccgtcacctcggagggtctggatctgtggttcccggcagcccctgcttggaccggcatgtggcctatggtggctattctaccccggaggatcggagacccacactgtcccggcagagcagtgcctctggctaccaggctccttccacgccctccttccctgtctcccctgcctactaccctggcctgagcagccctgccacctccccgtcaccagactccgcagccttccggcaagggagcccaacaccagccttgccagagaagcgaaggatgtcagtgggagaccgggcaggcagcctccccaactatgccaccatcaatgggaaggtgtcttcgcctgtcgccagcggcatgtccagtcccagtgggggcagcaccgtctccttctcccacactctgcccgacttctccaagtactccatgccagacaacagcccggagacgcgggctaaagtgaagtttgtccaggacacttctaagtattggtacaagcctgagatctccagggagcaggccatcgcgctcctcaaggaccaggagccgggggccttcatcatccgcgacagtcactccttccgaggcgcgtacgggctggccatgaaggtgtcttcgccacctccaaccatcatgcagcagaataaaaaaggagacatgacccatgagctggtcaggcattttctgatagagactggccccagaggagtcaagctcaagggctgccccaatgagccaaacttcggatcgctgtctgccctggtctaccagcactccatcatcccattggccctgccttgcaagctggtcattccaaaccgagaccccacagatgaatcgaaagatagctccggccctgccaactcaactgcagacctgctgaaacaaggggcagcctgcaatgtgctcttcgtcaactctgtggacatggagtcactcactgggccacaggccatctctaaagccacatctgagacgttggctgcagaccccacgccagctgccaccatcgttcacttcaaagtctctgcccagggaatcactctgactgacaaccagagaaagctctttttcagacgccactaccctctcaacactgtcaccttctgtgacctggatccacaggaaagaaagtggatgaaaacagagggtggtgcccctgctaagctcttcggcttcgtggcccggaagcagggcagcaccacggacaacgcctgccacctctttgctgagcttgaccccaaccagccggcctctgccatcgtcaacttcgtctccaaggtcatgctgaatgccggccaaaagagatgaaccctgccccttgcccagggccagtgccatggggaaggggcttgtggggaggggacccatgaatcctgaccactcttgaacccagaaggaggactttgggccaatttcggaggagagaagaaagtgcaacgtggggagagggaagtgaattgcagaggggagggggaaaagagagagagagagagagagagagagagagagaaagatggaggagaagaacttggattcccctgggtagatggaaactgcaaaaacccaaagcctccaaaactaaccaggtccacctaacaccccctccctcccctaagaagatggatgtcctcaaaagagaaggaacaaacctccttgggaatccacattttttgggggaatggaaaagctctgtctccctaactcaactgctttgcaaggggaaatcaagctgggagaatctttttctggccacctgtggggtaggttgtcaaaccaaacagagccaccgtgggacatcaagtggaagaacttgtttgcttgaaagtatctcagacccaaggcacctcaggtctctttgctgtgcctccactatattgtcgtgtgggtgtgtgtctgcacccacatcctcacacattgatctagatctgcctttatccactcgaattataaacagctcggcttgtccttgtcccatgtgtttgtagacacacatgcatactgtccaaagattagggttggtggtggcagtgcagcaggggagggacaaacaaccaagctatgggtgacagaggctctctcctggtgcctgcacctgcactctagtgaccctgggtgccgccagacccttctcttctacaaagaccccagcaggagtgggagggtctgcaatggcatcgccctgtcctgccttggccagaagcctggagctttggtttgaggaggtagagatatgtgtatccataggaagagatctgtcagaacaggcagctgttgagctcggggtgtcttccccaaggcatgtggctcagcagcaagaaaggcaagttgctcctgctggggccctggactctgccttagctcccacctctcagccttgttattgggtttcatgcccctggaccagccttatctcagacctgcttacctgcatgatgcctttttgggggctggggattgagtcttgctgctctgcccagccctgttctattctgcagggtccctgtgttggaattctccctggggaacctactttctgctcagtgaggctccggccagaaacctggagtccttatcctcccctctgtaagtgttttagggtctggcttttgcaggcaccctctgacctcagcagagctcctgggcctgctgcctgcacaccacatcgcctacctacaatgccaaagcctcactgtcaccctttctgccttggtttccctagctgagccacgctgcccatgcagcagagggcagaaggcttgcacttgggccaaagggcctaaggtccactggacagttgggaaaacacctgaccaccatttaaggactctaagccagaatggaaaattcaccaggactccattcttaagcctatgcgagtcccctagagagaggcattgtactgatatataaatattatataatatatacatgagacatactgacagaatctgtaagctaataaaatgtaagaaaaggttaaaaaaagaataggtaaattgacaagaagtatttattgtttttccatattgctttattgccttccttggggataaaccaattcctatccttttttatatgtgtaagtaaagcctgaagtgtagggggcctttgttcttgaagcagccagggtctccttgccctggccttggccttccctagactgtgtggggctcagcattgggaggggttgcacatgtcccagcctttggcccccttacttttcagcaagccaggggcccagcagtcagctcccaggatgtgtggggagctgtccctgactctgcaggcctgagcgagtgtgtgagcatgcggggacatgggtgtgtatggcacacataggtgcgtgtgtgtcttttgtattttttctcctccaaggagctgtgtcagtgtggacgttctgtttcagggagttggaaaggagggtgtctgcagaaggtggagagcaggggcagaggccccactggccaccccctgcttcccagagtgaaaccttgtgcctggtgaccaaagtccctccaaagtgctcttccttctgggttattcaagccaaatatctgggtttccccctctcctcattccctagcaaaccccaattatcttccaagataggagatatttcccatccccttcctttgtaaatatctcatctcccactggagagcccaggagcctattcctggcatggatgttctgtccacacttgaggctgggcggtgtatcagacccttcaagcagcctggctggggcccaggactgagtctggggtcagctttcacggtcgcttttcccttcctcaccacccaccacagcccaccttgcatgcatggccagcccctccactccagcctgagccatgtgtgcccctgcgggaggacccattcatgccagaaagctggtaactccctcccagcatccctgcggaaggagtcagtttctgagagtgtgacttttcaaggcgaatgatggggaagggttccccagtccccacagtggccccacctctgggccctgcaccagagcccttctgtgtcacggcgggctgtgcacccatgcacacacctacgcacacacaacactccgcactgcagtatattcttgccaaagatttcctttaaaagcaagcacttttactaattattattttgtaaatgtttatcttcttctgtcttctccctccctgaatctattttactgttgtttattgttgaatctgtgtgtcagccaggagagcgctgtctggccttgaacatgggctgggatgggaaagggtctgggagaagatgggcaacaaagagccagggagtcatggacatcgcagcgacgcagaccccagcaggttcagtcccgtgctgccaccagctgtccagctgggtgtctggagggaagagggcagaggagggtcatgtcccttcagctgggggaggggcccagtgagctccacgtggctttttcccaaagggagcaagagggaaggattgggcgagaaaacaatggagaggggacctgcgaaggaaaacagggaggaagtgagcggtttgatcagcctgctatcacggtgttctggctctcttatttagccaggcgcttaagggacagatacatcacatcctaagtttgggaaaggcctttgacccatgtcatctgagcgtctcctccagtagctctgaaagctgtggacaccaatggccaggattccttctcccctggtttttgaggatccctgggtcttctgagactggccaggagagggatggtggggccagtggttgtgtgaaagcaggaggggcagccctcctggacaagtgtgatccccctataaacggctctcaggaggttagtgagtaggagattctgccttgttctgatgagcctgtgcaggggctccaggggagcatgctgtccagggggcacagaagggtggtgagtgtgatcaaatctagtctcactcccactttttagtctcactcctacttttgtccaccacccctgcctcctggatcttctcccactttttttttcagctttaggacctggggagatcctgtgagtcaaggcagacacccaatcctgcccccacactcggggtcctccaagaggttggggggcagagtcccagagcagccctttaccccaggtccaggccctggaatcctgagactcgcgtttccttggccagtggtaacacaggacgtgtgtgcgcatgtgcaagtgtggatgtatgtgtgtgcgtgtgttttgctcatttctttagggaacttgggagtcggggttggaggtgctgggcaatggaacttcaaattcaatgtcgcccagcagtgaggggagtcgggaggtgaggcctgtaggccaaccaattggtggagtctcagcgatagcccaggtgagaagtggttcacccagaggggcagggtgggggcctcgggcagatctgtccctcttggcacctctgtcctcaaatgtccaaaatgttggaggacctctgttcatatcccacgcctgggctcttgccagcagtggagttactgtagagggatgtcccaagcttgttttccaatcagtgttaagctgtttgaaactctcctgtgtctgtgttttgtttgtgcgtgtgtgtgagagcacatcagtgtgtgcaggctgtgtttccccatttctctcctcccttcagacccatcattgagaacaaatgtaagaaatcccttcccaccaccctccctgcctcccaggccctctgcgggggaaacaagatcacccagcatccttccccaccccagctgtgtatttatatagatggaaatatactttatattttgtatcatcgtgcctatagccgctgccaccgtgtataaatcctggtgtatgctccttatcctggacatgaatgtattgtacactgacgcgtccccactcctgtacagctgctttgtttctttgcaatgcattgtatggctttataaatgataaagttaaagaaaactctg

SEQ ID NO: 55 - DNA, 6250 bp, Homo sapiens
cgcctgcttgtcggcccagaacggggagtcgtccccctcgtcgtcgtcgtccgcgggggacctggcccacgccaatgggctcctgccttccgccccctccgccgccagcaacaatagcaacagcctgaatgtcaataacggggttcccggcggggcggccgccgcatcctcagccaccgtcgcagctgcctccgccaccaccgccgcctcctcttccttggccaccccagaactgggcagcagcctcaagaagaagaagcggctctcccagtcagatgaggatgtcattaggctaataggacagcacttgaatggcttagggctcaaccagactgttgatctcctcatgcaagagtcaggatgtcgtttagaacatccttctgctaccaaattccgaaatcatgtcatggaaggagactgggataaggcagaaaatgacctgaatgaactaaagcctttagtgcattctcctcatgctattgtggtaagaggcgcacttgaaatctctcaaacgttgttgggaataattgtgaggatgaagtttttgctgctgcagcagaagtacctagaatacctggaggatggcaaggtcctggaggcacttcaagttctacgctgtgaattgacgccgctgaaatacaatacagagcgcattcatgttcttagtgggtatctgatgtgtagccatgcagaagacctacgtgcaaaagcagaatgggaaggcaaagggacagcttcccgatctaaactattggataaacttcagacctatttaccaccatcagtgatgcttcccccacggcgtttacagactctcctgcggcaggcggtggaactacaaagggatcggtgcctatatcacaataccaaacttgataataatctagattctgtgtctctgcttatagaccatgtttgtagtaggaggcagttcccatgttatacgcagcagatacttacggagcattgtaatgaagtgtggttctgtaaattctctaatgatggcactaaactagcaacaggatcaaaagatacaacagttatcatatggcaagttgatccggatacacacctgctaaaactgcttaaaacattagaaggacatgcttatggcgtttcttatattgcatggagtccagatgacaactatcttgttgcttgtggcccagatgactgctctgagctttggctttggaatgtacaaacaggagaactaaggacaaaaatgagccagtctcatgaagacagtttgacaagtgtggcttggaatccagatgggaagcgctttgtgactggaggtcagcgtgggcagttctatcagtgtgacttagatggtaatctccttgactcctgggaaggggtaagagtgcaatgcctttggtgcttgagtgatggaaagactgttctggcatcagatacacaccagcgaattcggggctataacttcgaggaccttacagataggaacatagtacaagaagatcatcctattatgtcttttactatttcaaaaaatggccgattagctttgttaaatgtagcaactcagggagttcatttatgggacttgcaagacagagttttagtaagaaagtatcaaggtgttacacaagggttttatacaattcattcatgttttggaggccataatgaagacttcatcgctagtggcagtgaagatcacaaggtttacatctggcacaaacgtagtgaactgccaattgcggagctgacagggcacacacgtacagtaaactgtgtgagctggaacccacagattccatccatgatggccagcgcctcagatgatggcactgttagaatatggggaccagcaccttttatagaccaccagaatattgaagaggaatgcagtagcatggatagttgatggtgaatttggagcagacgacttctgtttaacttaaaattagtcgtattttaatggcttgggatttggtgcaaacaaacatgattgatagctggacagacatgctcgtcatgaaaaaagaaccatttctgaagcccgattggggccaaacatttacaccttgcttcatagtaaccagttgagatgaagcacgtcgttagaacgttgttggacaccatgttgaattattcccccatcggttgtgaagaactgtgctacattcaggcttacccattgaactcagtatatatatttttttccttcctgtcttttgtctggcaggataccattcttgttgctcttctgtgtaatgaagtttaaatgcttgtttggaaaactttatttaacagtttagaaggcttgatagaaagagtgcattagtctgaagagtatacattggataggaaagaatttccttcttttgtttctccaaatctttccgccttatttagcttgagatctttgcagcttggttcatggattctagccttgcccgttgcgcagtatatactgatccagatgataaaccagtgaactatgtcaaaagcactctcaatattacatttgacaaaaagttttgtacttttcacatagcttgttgccccgtaaaagggttaacagcacaattttttaaaaataaattaagaagtatttataggattaaagtgacttcatttgtatacatttggaatctaaaccagcttaaaaacagtttcctcaatgacttagatacacagtataactgatgctcttctggaataccacatgagacatggtcagaaacagtgcttggaaggacattacacaagaaattcagagtaatgctttgaagatttccccccttttgttttattcctgaaggaacatcagtacccgatcttgaagaaattcaagattcaaaaagaattttaaatacaccaacatgagacatcagtagtcagttggttttcagtaaagcttgttccaagttgttctcaacttaggaagtaattttggtgtgatctagcaaaagagtaggaatcagcgatacaaccactttggaagtttatagtataattgaaattattagaagaattcagcaggttacagacatacttaaactgggattaaaacctcatagtcatttttcttaattgcccttaatattttgacatatagggatacataaatttaaagaatattttttctcagttttttcagatattgccatactgaacctcattctaaactggtgctgtggatagtctttccctctcccctcctgttttagtttaaggaaaggtttccttcatggaaaagcacttttaattttgagaatttcacatttaaaataagccaaaagcctgatgttcacattgtgcttttaaactccgtaacagctgaatacaacataacatagtctcccttgaaattccctccctttttcagtagaggataaatagggtgactccagctgttggaatgagaatggggatacccccaaaataagattctggtgaagaaaaagtcttgtactaagttcccctttaggtgtagccaagtctataatataattatgatcatgaatagactccagaatccacaaagagaagagggcttggatgtcaaaaattcttccattgtggggtaggtggtcggggatgggagaaagggaaaagtcagggaaggggagaagaaagaaaaacacatttggccttaaaatagcatgcattctcccagaagcccatagtaaagaaaatgacagatcgtggtcagcagactcttatcaaattggtatgtaaaagatttcttcaagctccattttgcagagaccaccacttagagaatcaaaaaattcctgttttgatacttctaagttaaaatatatgttacagtttatctggtacttcatttttcttaactaaaattactttttactttaagcttgaataaaaatcttcattggtaactgtatgtaattaagtggcaacttctctttacctcagtatagttaaaaaccattcatattttaagtgattcatgtataccctgaagccgttaatacaccccagtctctatggtaacatcactaaatgtgggcatagaaactccacagctgtttacaaatttggttacagtgtgctacggtgcatttgtaacactcagatttgtgcccattcaggggcaatttggcactcagattctactctacttcacctaaccacccctagatctgagttttcagagtgcttctgaagtacagtttaaaaacactttttaaaaagtggagtaaaagtgaggcacattttacaagaacataactcctattaaaacggagtaacaactatgcaaaggtttctatagcagctaggtgagtttgttttccgggtctgtcttaactggcagcttcctgtacatactggtacttatttgctgtaaacgtctgtttcatacatttgccatgcagtgactgtgctcgaaaggtgaaatcaatggtaaagaagcctaggattttatggtatgagaaactgatcgcaggattttctgatccatagctattaattgaaaacttctgatagtgctgtaggctctatagtaggcttaagagtgagtcttatactatgaagccagccacaagatactaacaaatgtataaattgaaaagtaccaatactttttgcacatagatcaaaatagagtggagaatttgggctccaaaaatcaggttagtaggctcatttccatgtgcttaaaaatgtttttgttgttatgcattgattaagggctagagcaaatataaaattaaatgtctttttcctccaaataattggttattaatggtaaaatgttggacttggggattactgagattagtatgtgggtagtaaagaattggagtgggagttagtggggagggatgacaaagcttcagctttggtttttgtatttttttagtcttcataacagctacatttctgttgctcttattggccagataaatgtgttatattaaaccaggtaagtattttaaacagagaacattttatttgcatatatccctacaaattggcccattttattgggtggggggataaaaaagggattccctaactttaaataatcagaatatcctgcaattgaaaggagaaaaaaatccaattttgtcagtattttcttagtctgaaaaaaacagcagtagtaatctggtgaatgttattattaggagtgttctgcctctacagtggcatattccatgacattaatagaaaacccttctttcccacccctccccatcttgacattttcttttttaggatgttggttcctgcaaacaagaactgaccctatcacctctgcctcacagtgggtaaatatatcatacatctcttgaaagggaaaatatccatgtcagtttctttcacagtagaagaatggctgcttttgaatggggaggaaagaagacatttttcttaatatcctttttgtcccatctctaaaatgtataaatattttgatttggttttactttaatttctcattcataatttcgcaactgtccttttgggttgccctccaacacattacttccatttcagaaaccatatctgatttaatataaactgctaacttaagaagaggtgaatttgcatttacacttagacactttctaaaaacagggtgaacttaattgaaatttttcagtgttgttaagctattgttatagtagctgccctatagttacaaaaataaaaactataaaaacccatcccctatctacttaatccagatagcctggatttaacaaaaccaatagtataaaaatgtgtgtgtgtgttctgtgtgtgtgtgagagagagagtacttgattcattaaaaagtcctggaaacagctgttctaggatcttgtcatttttactgaaagtctcgtgcacatgtgaagtgccctctgagtttaaggtttggttaatactggtatatttttataagattgaaattgtgtccccatctttaacttaaacattttcattatcagggtcaatgtgctagaactgaattgtaacatttttaggcacagatggaaaaaaatgttattggctccttgaaaatgtgtgtgtgtggcgaggggaatagatccacaaaagcatgtatgtacttacaaaccaagctgtagagatcaagaaaagaacttaagtgttgatctcaagatttctaaattgtcaagatttacatggcattgtggtggaactagttaacacttagagcttttggtatgtaataactatttgctatggactgattaaatgtttcaaaagattgtgttcttcaaaaaaaaaaaaaaaa

SEQ ID NO: 56 - DNA, 4786 bp, Homo sapiens
ctcggcgctgaaattcaaatttgaacggctgcagaggccgagtccgtcactggaagccgagaggagaggacagctggttgtgggagagttcccccgcctcagactcctggttttttccaggagacacactgagctgagactcacttttctcttcctgaatttgaaccaccgtttccatcgtctcgtagtccgacgcctggggcgatggatccgtttacggagaaactgctggagcgaacccgtgccaggcgagagaatcttcagagaaaaatggctgagaggcccacagcagctccaaggtctatgactcatgctaagcgagctagacagccactttcagaagcaagtaaccagcagcccctctctggtggtgaagagaaatcttgtacaaaaccatcgccatcaaaaaaacgctgttctgacaacactgaagtagaagtttctaacttggaaaataaacaaccagttgagtcgacatctgcaaaatcttgttctccaagtcctgtgtctcctcaggtgcagccacaagcagcagataccatcagtgattctgttgctgtcccggcatcactgctgggcatgaggagagggctgaactcaagattggaagcaactgcagcctcctcagttaaaacacgtatgcaaaaacttgcagagcaacggcgccgttgggataatgatgatatgacagatgacattcctgaaagctcactcttctcaccaatgccatcagaggaaaaggctgcttcccctcccagacctctgctttcaaatgcctcggcaactccagttggcagaaggggccgtctggccaatcttgctgcaactatttgctcctgggaagatgatgtaaatcactcatttgcaaaacaaaacagtgtacaagaacagcctggtaccgcttgtttatccaaattttcctctgcaagtggagcatctgctaggatcaatagcagcagtgttaagcaggaagctacattctgttcccaaagggatggcgatgcctctttgaataaagccctatcctcaagtgctgatgatgcgtctttggttaatgcctcaatttccagctctgtgaaagctacttctccagtgaaatctactacatctatcactgatgctaaaagttgtgagggacaaaatcctgagctacttccaaaaactcctattagtcctctgaaaacgggggtatcgaaaccaattgtgaagtcaactttatcccagacagttccatccaagggagaattaagtagagaaatttgtctgcaatctcaatctaaagacaaatctacgacaccaggaggaacaggaattaagcctttcctggaacgctttggagagcgttgtcaagaacatagcaaagaaagtccagctcgtagcacaccccacagaacccccattattactccaaatacaaaggccatccaagaaagattattcaagcaagacacatcttcatctactacccatttagcacaacagctcaagcaggaacgtcaaaaagaactagcatgtcttcgtggccgatttgacaagggcaatatatggagtgcagaaaaaggcggaaactcaaaaagcaaacaactagaaaccaaacaggaaactcactgtcagagcactcccctcaaaaaacaccaaggtgtttcaaaaactcagtcacttccagtaacagaaaaggtgaccgaaaaccagataccagccaaaaattctagtacagaacctaaaggtttcactgaatgcgaaatgacgaaatctagccctttgaaaataacattgtttttagaagaggacaaatccttaaaagtaacatcagacccaaaggttgagcagaaaattgaagtgatacgtgaaattgagatgagtgtggatgatgatgatatcaatagttcgaaagtaattaatgacctcttcagtgatgtcctagaggaaggtgaactagatatggagaagagccaagaggagatggatcaagcattagcagaaagcagcgaagaacaggaagatgcactgaatatctcctcaatgtctttacttgcaccattggcacaaacagttggtgtggtaagtccagagagtttagtgtccacacctagactggaattgaaagacaccagcagaagtgatgaaagtccaaaaccaggaaaattccaaagaactcgtgtccctcgagctgaatctggtgatagccttggttctgaagatcgtgatcttctttacagcattgatgcatatagatctcaaagattcaaagaaacagaacgtccatcaataaagcaggtgattgttcggaaggaagatgttacttcaaaactggatgaaaaaaataatgcctttccttgtcaagttaatatcaaacagaaaatgcaggaactcaataacgaaataaatatgcaacagacagtgatctatcaagctagccaggctcttaactgctgtgttgatgaagaacatggaaaagggtccctagaagaagctgaagcagaaagacttcttctaattgcaactgggaagagaacacttttgattgatgaattgaataaattgaagaacgaaggacctcagaggaagaataaggctagtccccaaagtgaatttatgccatccaaaggatcagttactttgtcagaaatccgcttgcctctaaaagcagattttgtctgcagtacggttcagaaaccagatgcagcaaattactattacttaattatactaaaagcaggagctgaaaatatggtagccacaccattagcaagtacttcaaactctcttaacggtgatgctctgacattcactactacatttactctgcaagatgtatccaatgactttgaaataaatattgaagtttacagcttggtgcaaaagaaagatccctcaggccttgataagaagaaaaaaacatccaagtccaaggctattactccaaagcgactcctcacatctataaccacaaaaagcaacattcattcttcagtcatggccagtccaggaggtcttagtgctgtgcgaaccagcaacttcgcccttgttggatcttacacattatcattgtcttcagtaggaaatactaagtttgttctggacaaggtcccctttttatcttctttggaaggtcatatttatttaaaaataaaatgtcaagtgaattccagtgttgaagaaagaggttttctaaccatatttgaagatgttagtggttttggtgcctggcatcgaagatggtgtgttctttctggaaactgtatatcttattggacttatccagatgatgagaaacgcaagaatcccataggaaggataaatctggctaattgtaccagtcgtcagatagaaccagccaacagagaattttgtgcaagacgcaacacttttgaattaattactgtccgaccacaaagagaagatgaccgagagactcttgtcagccaatgcagggacacactctgtgttaccaagaactggctgtctgcagatactaaagaagagcgggatctctggatgcaaaaactcaatcaagttcttgttgatattcgcctctggcaacctgatgcttgctacaaacctattggaaagccttaaaccgggaaatttccatgctatctagaggtttttgatgtcatcttaagaaacacacttaagagcatcagatttactgattgcattttatgctttaagtacgaaagggtttgtgccaatattcactacgtattatgcagtatttatatcttttgtatgtaaaactttaactgatttctgtcattcatcaatgagtagaagtaaatacattatagttgattttgctaaatcttaatttaaaagcctcattttcctagaaatctaattattcagttattcatgacaatatttttttaaaagtaagaaattctgagttgtcttcttggagctgtaggtcttgaagcagcaacgtctttcaggggttggagacagaaacccattctccaatctcagtagttttttcgaaaggctgtgatcatttattgatcgtgatatgacttgttactagggtactgaaaaaaatgtctaaggcctttacagaaacatttttagtaatgaggatgagaactttttcaaatagcaaatatatattggcttaaagcatgaggctgtcttcagaaaagtgatgtggacataggaggcaatgtgtgagacttgggggttcaatattttatatagaagagttaataagcacatggtttacatttactcagctactatatatgcagtgtggtgcacattttcacagaattctggcttcattaagatcattatttttgctgcgtagcttacagacttagcatattagttttttctactcctacaagtgtaaattgaaaaatctttatattaaaaaagtaaactgttatgaagctgctatgtactaataatactttgcttgccaaagtgtttgggttttgttgttgtttgtttgtttgtttgtttttggttcatgaacaacagtgtctagaaacccattttgaaagtggaaaattattaagtcacctatcacctttaaacgcctttttttaaaattataaaatattgtaaagcagggtctcaacttttaaatacactttgaacttcttctctgaattattaaagttctttatgacctcatttataaacactaaattctgtcacctcctgtcattttattttttattcattcaaatgtattttttcttgtgcatattataaaaatatattttatgagctcttactcaaataaatacctgtaaatgtctaaaggaaaaaaaaaaaaaaaaaa

SEQ ID NO: 57 - DNA, 1746 bp, Homo sapiens
ggaggccggctatttgaaggcggcgcgcggactaggtgcgcacttcagttctcggagagaagaggcgggagtggacctggtcagccctaccccactgaccccaccggacccaggcgcggcctccgccacagccacagcccctgcccctgctgcggcgcggcgaggcgaggcgatggccaaggtgtcggtgctgaacgtggcggtcctggagaacccgagccctttccacagccccttccggttcgagatcagcttcgagtgcagtgaagccctggcggacgacctggagtggaagatcatttatgttggctcggctgagagtgaggaatttgatcagatcctagactcggtgctggtgggccctgtgccagcagggagacacatgtttgtctttcaggccgacgcccccaacccatccctcatcccagagactgatgccgtgggtgtgactgtggtcctcatcacctgcacctaccatggacaggagttcatccgagtgggctactacgtcaacaacgagtacctcaaccctgagctgcgtgagaacccgcccatgaagccagatttctcccagctccagcggaacatcttggcctcgaacccccgggtgacccgcttccatatcaactgggacaacaacatggacaggctggaggccatagagacccaggacccctccctgggctgcggcctcccactcaactgcactcctatcaagggcttggggctccctggctgcatccctggcctcctccctgagaactccatggactgcatctaactgcaggaacccagagtgtcccagcacgccgggaggggcaaccaggcctcccagcgagtcctgcagggcccatctagaggactttgggggccatcagctgcaatccaggtctgtcaaactcagcccctaggaaagaacaggccttgggtctcccctagtcctggccagaaggatgatctcgcttttcctctacaggcctataagaagcaggtacttcagttctaaattctgacttgtgttcttttcgtcttcataaattctaactaaggccactgtgccactgtgcacccttgagtaccattgatccaaagctttcccacagacctccctggcccacctagaggctttcttggtcagtgcctgtcaaggctccagtcctgctgagccaaaggctttgtcattcctttctcttcctgtacatctgagcagacccactccagctttctggtgtcacaggcgggaatgttagttagtaggtagacttagatcccatttctgtcctgctcccaggaagattcttaggtcctcttcaatccagcagcccctcccagaggtgtgatcagcaggatgctgaggaaccatgttgcctttcctgtcaatcacagccaccttcctgttatctcctaaatggatctggcttttcctggaggctgccatggttggaagatggtatcagagggcctgcctgggcagtctgtctccgggccagggtcagggaccctctgcctctggcagccttaacctgtcctctgctaggaccagggtgatttcaagccagggaagcaactgggaccctgaaaactgtccctccccagcccgctccccctctctgtgccctggtccccttgctgccatgtggatgctgttgtgattgctgtttgtatattatcaaaatgtttttatattaaaaatgtttggtctgaaaattaaaagcacttcatttagaatgaaaaaaaaaaaaaaaa

SEQ ID NO: 58 - DNA, 10434 bp, Homo sapiens
atggcgaaccggcgagtggggcgaggctgctgggaagtgagcccgaccgagcggaggccgcccgcggggctgcggggccccgcggccgaggaggaggcgtcttccccgccggtcctgtctctcagccacttctgcaggtctcctttcctttgcttcggggacgttctcctgggagcctcacggacgctgtctctggccctagacaaccctaacgaggaggtggcagaagtgaagatctcccacttcccggccgcggacctgggcttcagtgtgtcgcagcgctgtttcgtgttgcagcctaaagagaaaattgttatttctgttaactggacaccactcaaagaaggccgagtaagagagattatgacatttcttgtaaatgatgttctgaaacaccaagctatattactaggaaatgcagaagagcagaaaaagaaaaagaggagtctttgggataccattaaaaagaagaaaatttcagcctctacaagtcacaacagaagggtttcaaatattcagaatgttaataaaacatttagtgtttcccaaaaagttgacagagttaggagcccactacaagcttgtgaaaacttggctatgaatgaaggcggtcccccaacagaaaacaattctttaatacttgaagaaaataaaatacccatatcacctattagccctgctttcaatgaatgccatggtgcaacttgcttgccactctctgtacgtcgatctactacctactcatctcttcatgcatcagaaaatagggaactattaaatgtacacagtgccaacgtttcaaaagtttcttttaatgagaaagctgtaactgaaacttcctttaattctgtaaatgttaatggccaaagaggagagaatagtaaacttagtcttacccccaactgttcttcaactttgaacattacacaaagccaaatacattttctaagtccagattcttttgtaaataatagtcatggagctaataatgaactagaattagtaacatgtctttcatcagatatgtttatgaaagataattcacagcctgtgcatttggaatcaacaattgcacatgaaatttatcagaaaattttaagtccagattctttcataaaagataattatggactaaatcaggatctagaatcagagtcagttaatcctattttatcccctaatcaatttttaaaagataacatggcatatatgtgtacatctcagcaaacatgtaaagtaccattatcaaatgaaaattctcaagtcccacagtctcctgaagattggagaaaaagtgaagtttcgccacgtattcctgaatgtcagggttcaaaatctcccaaagctatttttgaagaactagtagaaatgaagtcaaattactacagttttataaaacaaaataatcctaaattttctgcagttcaggatatttctagtcatagccacaataaacaacctaagagacgtccaatactttctgccactgttactaaaaggaaggccacctgtaccagagaaaaccaaactgagattaataaaccaaaagcaaaaagatgtctcaacagtgcagtgggtgaacatgaaaaagtaataaataatcaaaaggaaaaagaagattttcattcttatcttccaattatagatccaatattaagtaaatctaagagttataaaaacgaggtaacaccctcttcgacaacagcttcagttgctcggaaaagaaagagcgatggaagcatggaagatgcaaatgtgagagttgcaattacagaacatacagaagtgcgagaaatcaaaagaatccatttttctccctcagagcctaaaacatcagctgttaagaaaacaaaaaatgtgacaacacccatctcaaaacgtattagcaacagagagaaattaaacctgaagaagaaaactgatttatcaatattcagaactccaatttctaaaacaaacaaaaggacaaaacccattatcgctgtggcacagtccagtttgaccttcataaaaccattaaaaacagatattcccagacacccgatgccatttgctgcaaaaaacatgttttatgatgaacgctggaaggaaaagcaggaacagggcttcacttggtggttaaattttatattaacccctgatgacttcactgtaaaaacaaatatttctgaagtaaatgctgctactcttcttttgggaatagagaatcaacataaaataagtgttcctagagcacctacaaaagaggaaatgtctctcagagcttatactgctcggtgtaggttaaacagactacgtcgtgcagcatgccgtttgtttacttctgaaaaaatggttaaagctattaaaaagcttgaaattgaaattgaagctaggcggttaattgttcgaaaagatagacacctatggaaagatgtgggagaacgtcagaaagtcctgaattggctgttgtcctacaatcctttgtggcttcgaattggtctagagacaacttatggagaactcatatctttggaagataacagtgatgtcacagggttggctatgtttattctgaatcgcctactttggaatcctgatatagcagctgagtatagacaccccactgttcctcacctgtatagagatggtcatgaagaagctttgtccaagtttacattgaaaaagttattgttgttggtctgttttcttgattatgctaaaatttccagactcattgatcatgatccttgtctcttctgtaaagatgccgaattcaaggctagtaaagaaatccttttggctttttcacgagatttcctaagtggtgaaggtgacctttcccgtcaccttggcttattgggattacctgttaaccatgttcagacaccatttgatgaatttgattttgccgttacaaatcttgccgtagacttgcaatgtggagtgcgccttgtgcgaaccatggaacttctcacacagaactgggacctctcaaagaaactcaggattccggcaataagtcgtcttcaaaagatgcacaatgttgacattgttcttcaagttcttaaatcacgaggaattgaattaagtgatgagcatggaaatacaattctatctaaggatattgtggataggcacagagaaaaaactctcaggttgctttggaaaatagcgtttgcttttcaggtggatatttcccttaacttagatcaattaaaggaagaaattgcctttctaaaacacacaaagagtataaagaaaacaatatctctactatcatgccattctgatgatcttattaataagaaaaaaggcaaaagggatagtggttcctttgaacaatatagtgaaaacataaagttattgatggattgggtaaatgctgtttgtgccttctataataaaaaggtggagaattttacagtgtctttctcagacggccgtgtgttatgttacctgatccaccattaccatccttgctatgtgccatttgacgctatatgtcagcgtactactcaaactgtggaatgtacgcaaactggttcagtggtattaaattcatcatctgaatctgatgacagttctctggatatgtcacttaaagcatttgatcatgaaaatacttcagagctatacaaagagctcctagaaaatgaaaagaaaaattttcacttggttaggtctgcagttagagaccttggtggaatacctgctatgattaatcattcagatatgtcaaatacaattccagatgaaaaggtggttattacctatttgtcatttctttgtgcaaggcttttggatcttcgtaaagaaataagagctgctcgactcatacaaacaacatggagaaaatataaactaaaaacagatctcaaacgccatcaggagagagagaaagctgcaagaattattcaattggctgtaatcaattttctagcaaaacaaagattgagaaaaagagttaatgcagcactcgtcattcagaaatattggcgaagagtcttagcacagagaaaattattaatgttaaaaaaggaaaagctggaaaaagttcaaaataaagcagcatcacttattcagggatattggagaagatattccactagacaaagatttctgaaattgaaatattattcaatcatcctgcaatctaggataagaatgataattgctgttacatcttataaacgatatctttgggctacagttacaattcagaggcattggcgtgcttatttaagaagaaaacaagatcaacaaagatatgaaatgctaaaatcatcaactcttataatccaatctatgttcagaaaatggaagcaacgtaaaatgcaatcacaagtaaaagctacagtaatattgcaaagagcttttagagaatggcatttaagaaaacaagctaaagaagaaaattctgctattatcatacaatcatggtatagaatgcataaagaattacggaagtatatttatattagatcttgtgttgttatcattcagaaaagatttcggtgctttcaagcccaaaagttatataaaagaagaaaagagtccatactaaccatccagaagtactacaaagcatatctgaaaggaaagattgagcgcaccaactatttgcagaaacgagctgcagccattcaattacaagctgcttttaggagactgaaagctcataatttatgtagacaaattagagctgcttgtgttattcagtcatactggagaatgagacaagacagagttcgatttttaaaccttaagaagactattatcaaatttcaggcacatgtaagaaaacatcaacaacgacagaaatataagaagatgaagaaagcagctgttataattcagactcatttccgagcttatatttttgccatgaaagttctagcatcttaccagaaaacacgctctgctgtcattgtgctgcagtctgcatatagagggatgcaagccaggaaaatgtatattcacatcctcacatctgttataaagattcaatcatattatcgtgcttatgtttctaaaaaggaatttttgagcctaaaaaatgctacaataaaattgcagtcaactgttaagatgaaacaaacacgtaaacaatatttgcatttaagagcagctgcactatttatccagcaatgttaccgttccaaaaaaatagctgcacaaaagagagaagagtatatgcagatgcgggaatcttgtatcaaactgcaagcatttgttagaggataccttgtccgaaagcagatgaggttacaaagaaaagctgttatttcactacagtcttatttcagaatgagaaaggctcggcagtattatctgaaaatgtataaagcaattattgtcattcagaattactatcatgcatacaaagcacaggtcaatcagaggaagaacttcttgcaagtcaaaaaagcagctacttgcttgcaagcagcttacagaggttataaagtacgccagctaatcaaacaacaatctatagctgctcttaaaattcagtctgcttttagaggctataataaaagggtaaaatatcaatctgtgcttcaatctataataaagattcagagatggtacagggcgtacaagactcttcatgatacaagaacacattttttgaagacaaaggcagctgtgatttccctccagtctgcttatcgtggctggaaggttcggaaacagattagaagggaacatcaagctgccttgaagattcagtctgcttttagaatggccaaggcccagaaacagtttagattgtttaaaacagcagcattagtcatccagcaaaatttcagagcatggactgcaggaaggaagcaatgtatggagtatattgaactccgtcatgcggtactggtgcttcaatctatgtggaagggaaaaacactgagaagacagcttcaaaggcaacataaatgtgctatcatcatacagtcatactatagaatgcatgtgcaacaaaagaagtggaaaatcatgaaaaaagctgctcttctgattcaaaagtattatagggcttacagtattggaagagaacagaatcatttatatttgaaaacaaaagcagctgtagtaactttacagtcagcttatcgtggtatgaaagtgagaaaaagaataaaggattgcaacaaagcagcagtcactatacagtctaaatacagagcttacaaaaccaaaaagaaatatgcaacctatagagcttcagctattataattcagagatggtatcgaggtattaaaattacaaaccatcagcataaggagtatcttaatttgaagaagacagcaattaaaatccaatctgtttatagaggtattagagttagaagacatattcaacacatgcacagggcagccacttttattaaagccatgtttaaaatgcatcagtcaagaataagttaccatacaatgagaaaagcagctattgttattcaagtaagatgtagagcatattatcaaggtaaaatgcagcgtgaaaagtacctgacaattttgaaagctgttaaagtccttcaggcaagttttagaggagtaagagttagacggactcttagaaagatgcagactgcagcaacactcattcagtcaaactacagaagatacagacagcaaacatactttaataagttaaagaaaataacaaaaacagtacagcaaagatactgggcaatgaaagaaagaaacatacaatttcaaaggtataacaaactgaggcattctgtaatatacattcaggctatttttaggggaaagaaagctagaagacatttaaaaatgatgcatatagccgcaactctcattcagaggagatttagaactctaatgatgagaagaagattcctctctctcaagaaaactgctattttgattcagagaaaatatcgggcacatctttgtacaaagcatcacttacagttccttcaggtacaaaatgcagttattaaaatccagtcatcatacagaagatggatgataaggaaaaggatgcgagagatgcacagggctgctactttcatccagtctactttcagaatgcacagattacatatgagatatcgagctttgaaacaggcctccgttgtgatccaacagcaataccaagcaaatagagctgcaaaactgcagaggcagcattatctcagacaaagacactctgctgtgatccttcaggctgcattcaggggtatgaaaactagaagacatttgaagagtatgcattcctctgcaacccttattcagagtaggtttagatcattactggtgaggagaagattcatttccctcaaaaaagctactatttttgttcagaggaaatatcgagccaccatttgtgccaaacataaattgtaccaattcttgcacttaagaaaggcagccattacaatacagtcatcttacagaagactgatggtaaagaagaagttacaagaaatgcaaagggctgcagttctcattcaggctactttcaggatgcacagaacatatattacatttcagacttggaaacatgcttcaattctaattcagcaacattatcgaacatatagagctgcaaaattgcaaagagaaaattatatcagacaatggcattctgctgtggttattcaggctgcatataaaggaatgaaagcaagacaacttttaagggaaaaacacaaagcttctatcgtaatacaaagcacctacagaatgtataggcagtattgtttctaccaaaagcttcagtgggctacaaaaatcatacaagaaaaatatagagcaaataaaaagaaacagaaagtatttcaacacaatgaacttaagaaagagacttgtgttcaggcaggttttcaggacatgaacataaaaaaacagattcaggaacagcaccaggctgccattattattcagaagcattgtaaagcctttaaaataaggaagcattatctccaccttagagcaacagtagtttctattcaaagaagatacagaaaactaactgcagtgcgtacccaagcagttatttgtatacagtcttattacagaggctttaaagtacgaaaggatattcaaaatatgcaccgggctgccacactaattcagtcattctatcgaatgcacagggccaaagttgattatgaaacaaagaaaactgcaattgtggttatacagaattattataggttgtatgttagagtaaaaacagaaagaaaaaactttttagcagttcagaaatctgtacgaactattcaggctgcttttagaggcatgaaagttagacaaaaattgaaaaatgtatcagaggaaaagatggcagccattgttaaccaatctgcactctgctgttacagaagtaaaactcagtatgaagctgttcaaagtgaaggtgttatgattcaagagtggtataaagcttctggccttgcttgttcacaggaagcagagtatcattctcaaagtagggctgcagtaacaattcaaaaagctttttgtagaatggtcacaagaaaactggaaacacagaaatgtgctgccctacggattcagttcttccttcagatggctgtgtatcggagaagatttgttcagcagaaaagagctgctatcactttacagcattattttaggacgtggcaaaccagaaaacagtttttactatatagaaaagcagcagtggttttacaaaatcactacagagcatttctgtctgcaaaacatcaaagacaagtctatttacagatcagaagcagtgttatcattattcaagctagaagtaaaggatttatacagaaacggaagtttcaggaaattaaaaatagcaccataaaaattcaggctatgtggaggagatatagagccaagaaatatttatgtaaagtgaaagctgcctgcaagattcaagcctggtatagatgttggagagcacacaaagaatatctagctatattaaaagctgttaaaattattcaaggttgcttctataccaaactagagagaacacggtttttgaatgtgagagcatcagcaattatcattcagagaaaatggagagctatacttcctgcaaagatagctcatgaacacttcttaatgataaaaagacatcgagctgcttgtttgatccaagcacattatagaggatataaaggaaggcaggtctttcttcggcagaaatctgctgctttgatcatacaaaaatatatacgagccagggaggctggaaagcatgaaaggataaaatatattgaatttaaaaaatctacagttatcctacaagcactggtgcgtggttggctagtacgaaaaagatttttagaacagagagccaaaattcgacttcttcacttcactgcagctgcatattatcacctgaatgctgttagaattcaaagagcctataaactttacctggctgtgaagaatgctaacaagcaggttaattcagtcatctgtattcagagatggtttcgagcaagattacaagaaaagagatttattcagaaatatcatagcatcaaaaagattgagcatgaaggtcaagaatgtctgagccagcgaaatagggctgcatcagtaatacagaaagcagtgcgccattttctcctccgtaaaaagcaggaaaaattcactagtggaatcattaaaattcaggcattatggagaggctattcttggaggaagaaaaatgattgtacaaaaattaaagctatacgactaagtcttcaagttgttaatagggagattcgagaagaaaacaaactctacaaaagaactgcacttgcacttcattaccttttgacatataagcacctttctgccattcttgaggccttaaaacacctagaggtagttactagattgtctccactttgttgtgagaacatggcccagagtggagcaatttctaaaatatttgttttgatccgaagttgtaatcgcagtattccttgtatggaagtcatcagatatgctgtgcaagtcttgcttaatgtatctaagtatgagaaaactacttcagcagtttatgatgtagaaaattgtatagatatactattggagcttttgcagatataccgagaaaagcctggtaataaagttgcagacaaaggcggaagcatttttacaaaaacttgttgtttgttggctattttactgaagacaacaaatagagcctctgatgtacgaagtaggtccaaagttgttgaccgtatttacagtctctacaaacttacagctcataaacataaaatgaatactgaaagaatactttacaagcaaaagaagaattcttctataagcattccttttatcccagaaacacctgtaaggaccagaatagtttcaagacttaagccagattgggttttgagaagagataacatggaagaaatcacaaatcccctgcaagctattcaaatggtgatggatacgcttggcattccttattag

SEQ ID NO: 59 - DNA, 2270 bp, Homo sapiens
cgggaagctattaatagcattacgtcagcctgggactggcaacacggagtaaacgaccgcgccgccagcctgagggctataaaaggggtgatgcaacgctctccaagccacagtcgcacgcagccaggcgcgcactgcacagctctcttctctcgccgccgcccgagcgcacccttcagcccgcgcgccggccgtgagtcctcggtgctcgcccgccggccagacaaacagcccgcccgaccccgtcccgaccctggccgccccgagcggagcctggagcaaaatgatgcttcaacacccaggccaggtctctgcctcggaagtgagtgcttctgccatcgtcccctgcctgtcccctcctgggtcactggtgtttgaggattttgctaacctgacgccctttgtcaaggaagagctgaggtttgccatccagaacaagcacctctgccaccggatgtcctctgcgctggaatcagtcactgtcagcgacagacccctcggggtgtccatcacaaaagccgaggtagcccctgaagaagatgaaaggaaaaagaggcgacgagaaagaaataagattgcagctgcaaagtgccgaaacaagaagaaggagaagacggagtgcctgcagaaactcccaaggcccttttgggtccagaagacctgcatatgggctgttgactcatgcaaatgaggtatctgaactgcagcttcagtattagcagagccacaggccgcctctgtggcatcaccagggtttctctgaagaagagggtctgcattttcctaaacccagtgctgctctcccatctcccatcttcctctcgcagcttgatgagccccggtgtgtcccaggagtcggagaagctggaaagtgtgaatgctgaactgaaggctcagattgaggagctcaagaacgagaagcagcatttgatatacatgctcaaccttcatcggcccacgtgtattgtccgggctcagaatgggaggactccagaagatgagagaaacctctttatccaacagataaaagaaggaacattgcagagctaagcagtcgtggtatgggggcgactggggagtcctcattgaatcctcattttatacccaaaaccctgaagccattggagagctgtcttcctgtgtacctctagaatcccagcagcagagaaccatcaaggcgggagggcctgcagtgattcagcaggcccttcccattctgccccagagtgggtcttggaccagggcaagtgcatctttgcctcaactccaggatttaggccttaacacactggccattcttatgttccagatggcccccagctggtgtcctgcccgcctttcatctggattctacaaaaaaccaggatgcccaccgttaggattcaggcagcagtgtctgtacctcgggtgggagggatggggccatctccttcaccgtggctaccattgtcactcgtaggggatgtggagtgagaacagcatttagtgaagttgtgcaacggccagggttgtgctttctagcaaatatgctgttatgtccagaaattgtgtgtgcaagaaaactaggcaatgtactcttccgatgtttgtgtcacacaacactgatgtgacttttatatgctttttctcagatctggtttctaagagttttggggggcggggctgtcaccacgtgcagtatctcaagatattcaggtggccagaagagcttgtcagcaagaggaggacagaattctcccagcgttaacacaaaatccatgggcagtatgatggcaggtcctctgttgcaaactcagttccaaagtcacaggaagaaagcagaaagttcaacttccaaagggttaggactctccactcaatgtcttaggtcaggagttgtgtctaggctggaagagccaaagaatattccattttcctttccttgtggttgaaaaccacagtcagtggagagatgtttggaaaccacagtcagtggagcctgggtggtacccaggctttagcattattggatgtcaatagcattgtttttgtcatgtagctgttttaagaaatctggcccagggtgtttgcagctgtgagaagtcactcacactggccacaaggacgctggctactgtctattaaaattctgatgtttctgtgaaattctcagagtgtttaattgtactcaatggtatcattacaattttctgtaagagaaaatattacttatttatcctagtattcctaacctgtcagaataataaatattggaaccaagacatggtaaa

SEQ ID NO: 60 - DNA, 2554 bp, Homo sapiens
acaaggcagcctcgctcgagcgcaggccaatcggctttctagctagagggtttaactcctatttaaaaagaagaacctttgaattctaacggctgagctcttggaagacttgggtccttgggtcgcaggtgggagccgacgggtgggtagaccgtgggggatatctcagtggcggacgaggacggcggggacaaggggcggctggtcggagtggcggagcgtcaagtcccctgtcggttcctccgtccctgagtgtccttggcgctgccttgtgcccgcccagcgcctttgcatccgctcctgggcaccgaggcgccctgtaggatactgcttgttacttattacagctagagggtctcactccattgcccaggccagagtgcggggatatttgataagaaacttcagtgaaggccgggcgcggtggctcatgcccgtaatcccagcattttcggaggccgaggctggagtgcaatggtgtgatctcagctcactgcaacctctgcttcctgggtttaagtgattctcctgcctcagcctcccgagtagctgggattacaggcatcatggaccgatctaaagaaaactgcatttcaggacctgttaaggctacagctccagttggaggtccaaaacgtgttctcgtgactcagcaatttccttgtcagaatccattacctgtaaatagtggccaggctcagcgggtcttgtgtccttcaaattcttcccagcgcattcctttgcaagcacaaaagcttgtctccagtcacaagccggttcagaatcagaagcagaagcaattgcaggcaaccagtgtacctcatcctgtctccaggccactgaataacacccaaaagagcaagcagcccctgccatcggcacctgaaaataatcctgaggaggaactggcatcaaaacagaaaaatgaagaatcaaaaaagaggcagtgggctttggaagactttgaaattggtcgccctctgggtaaaggaaagtttggtaatgtttatttggcaagagaaaagcaaagcaagtttattctggctcttaaagtgttatttaaagctcagctggagaaagccggagtggagcatcagctcagaagagaagtagaaatacagtcccaccttcggcatcctaatattcttagactgtatggttatttccatgatgctaccagagtctacctaattctggaatatgcaccacttggaacagtttatagagaacttcagaaactttcaaagtttgatgagcagagaactgctacttatataacagaattggcaaatgccctgtcttactgtcattcgaagagagttattcatagagacattaagccagagaacttacttcttggatcagctggagagcttaaaattgcagattttgggtggtcagtacatgctccatcttccaggaggaccactctctgtggcaccctggactacctgccccctgaaatgattgaaggtcggatgcatgatgagaaggtggatctctggagccttggagttctttgctatgaatttttagttgggaagcctccttttgaggcaaacacataccaagagacctacaaaagaatatcacgggttgaattcacattccctgactttgtaacagagggagccagggacctcatttcaagactgttgaagcataatcccagccagaggccaatgctcagagaagtacttgaacacccctggatcacagcaaattcatcaaaaccatcaaattgccaaaacaaagaatcagctagcaaacagtcttaggaatcgtgcagggggagaaatccttgagccagggctgccatataacctgacaggaacatgctactgaagtttattttaccattgactgctgccctcaatctagaacgctacacaagaaatatttgttttactcagcaggtgtgccttaacctccctattcagaaagctccacatcaataaacatgacactctgaagtgaaagtagccacgagaattgtgctacttatactggttcataatctggaggcaaggttcgactgcagccgccccgtcagcctgtgctaggcatggtgtcttcacaggaggcaaatccagagcctggctgtggggaaagtgaccactctgccctgaccccgatcagttaaggagctgtgcaataaccttcctagtacctgagtgagtgtgtaacttattgggttggcgaagcctggtaaagctgttggaatgagtatgtgattctttttaagtatgaaaataaagatatatgtacagacttgtattttttctctggtggcattcctttaggaatgctgtgtgtctgtccggcaccccggtaggcctgattgggtttctagtcctccttaaccacttatctcccatatgagagtgtgaaaaataggaacacgtgctctacctccatttagggatttgcttgggatacagaagaggccatgtgtctcagagctgttaagggcttatttttttaaaacattggagtcatagcatgtgtgtaaactttaaatatgcaaataaataagtatctatgtctaaaaaaa

SEQ ID NO: 61 - DNA, 1253 bp, Homo sapiens
gggcggccgggagagtagcagtgccttggaccccagctctcctccccctttctctctaaggatggcccagaaggagaactcctacccctggccctacggccgacagacggctccatctggcctgagcaccctgccccagcgagtcctccggaaagagcctgtcaccccatctgcacttgtcctcatgagccgctccaatgtccagcccacagctgcccctggccagaaggtgatggagaatagcagtgggacacccgacatcttaacgcggcacttcacaattgatgactttgagattgggcgtcctctgggcaaaggcaagtttggaaacgtgtacttggctcgggagaagaaaagccatttcatcgtggcgctcaaggtcctcttcaagtcccagatagagaaggagggcgtggagcatcagctgcgcagagagatcgaaatccaggcccacctgcaccatcccaacatcctgcgtctctacaactatttttatgaccggaggaggatctacttgattctagagtatgccccccgcggggagctctacaaggagctgcagaagagctgcacatttgacgagcagcgaacagccacgatcatggaggagttggcagatgctctaatgtactgccatgggaagaaggtgattcacagagacataaagccagaaaatctgctcttagggctcaagggagagctgaagattgctgacttcggctggtctgtgcatgcgccctccctgaggaggaagacaatgtgtggcaccctggactacctgcccccagagatgattgaggggcgcatgcacaatgagaaggtggatctgtggtgcattggagtgctttgctatgagctgctggtggggaacccaccctttgagagtgcatcacacaacgagacctatcgccgcatcgtcaaggtggacctaaagttccccgcttccgtgcccatgggagcccaggacctcatctccaaactgctcaggcataacccctcggaacggctgcccctggcccaggtctcagcccacccttgggtccgggccaactctcggagggtgctgcctccctctgcccttcaatctgtcgcctgatggtccctgtcattcactcgggtgcgtgtgtttgtatgtctgtgtatgtataggggaaagaagggatccctaactgttcccttatctgttttctacctcctcctttgtttaataaaggctgaagctttttgtactcatgaaaaaaaaaaaaaaaaaa

SEQ ID NO: 62 - DNA, 2724 bp, Homo sapiens
cccagaaggccgcggggggtggaccgcctaagagggcgtgcgctcccgacatgccccgcggcgcgccattaaccgccagatttgaatcgcgggacccgttggcagaggtggcggcggcggcatgggtgccccgacgttgccccctgcctggcagccctttctcaaggaccaccgcatctctacattcaagaactggcccttcttggagggctgcgcctgcaccccggagcggatggccgaggctggcttcatccactgccccactgagaacgagccagacttggcccagtgtttcttctgcttcaaggagctggaaggctgggagccagatgacgaccccattgggccgggcacggtggcttacgcctgtaataccagcactttgggaggccgaggcgggcggatcacgagagaggaacataaaaagcattcgtccggttgcgctttcctttctgtcaagaagcagtttgaagaattaacccttggtgaatttttgaaactggacagagaaagagccaagaacaaaattgcaaaggaaaccaacaataagaagaaagaatttgaggaaactgcggagaaagtgcgccgtgccatcgagcagctggctgccatggattgaggcctctggccggagctgcctggtcccagagtggctgcaccacttccagggtttattccctggtgccaccagccttcctgtgggccccttagcaatgtcttaggaaaggagatcaacattttcaaattagatgtttcaactgtgctcttgttttgtcttgaaagtggcaccagaggtgcttctgcctgtgcagcgggtgctgctggtaacagtggctgcttctctctctctctctcttttttgggggctcatttttgctgttttgattcccgggcttaccaggtgagaagtgagggaggaagaaggcagtgtcccttttgctagagctgacagctttgttcgcgtgggcagagccttccacagtgaatgtgtctggacctcatgttgttgaggctgtcacagtcctgagtgtggacttggcaggtgcctgttgaatctgagctgcaggttccttatctgtcacacctgtgcctcctcagaggacagtttttttgttgttgtgtttttttgtttttttttttttggtagatgcatgacttgtgtgtgatgagagaatggagacagagtccctggctcctctactgtttaacaacatggctttcttattttgtttgaattgttaattcacagaatagcacaaactacaattaaaactaagcacaaagccattctaagtcattggggaaacggggtgaacttcaggtggatgaggagacagaatagagtgataggaagcgtctggcagatactccttttgccactgctgtgtgattagacaggcccagtgagccgcggggcacatgctggccgctcctccctcagaaaaaggcagtggcctaaatcctttttaaatgacttggctcgatgctgtgggggactggctgggctgctgcaggccgtgtgtctgtcagcccaaccttcacatctgtcacgttctccacacgggggagagacgcagtccgcccaggtccccgctttctttggaggcagcagctcccgcagggctgaagtctggcgtaagatgatggatttgattcgccctcctccctgtcatagagctgcagggtggattgttacagcttcgctggaaacctctggaggtcatctcggctgttcctgagaaataaaaagcctgtcatttcaaacactgctgtggaccctactgggtttttaaaatattgtcagtttttcatcgtcgtccctagcctgccaacagccatctgcccagacagccgcagtgaggatgagcgtcctggcagagacgcagttgtctctgggcgcttgccagagccacgaaccccagacctgtttgtatcatccgggctccttccgggcagaaacaactgaaaatgcacttcagacccacttatttctgccacatctgagtcggcctgagatagacttttccctctaaactgggagaatatcacagtggtttttgttagcagaaaatgcactccagcctctgtactcatctaagctgcttatttttgatatttgtgtcagtctgtaaatggatacttcactttaataactgttgcttagtaattggctttgtagagaagctggaaaaaaatggttttgtcttcaactcctttgcatgccaggcggtgatgtggatctcggcttctgtgagcctgtgctgtgggcagggctgagctggagccgcccctctcagcccgcctgccacggcctttccttaaaggccatccttaaaaccagaccctcatggctaccagcacctgaaagcttcctcgacatctgttaataaagccgtaggcccttgtctaagtgcaaccgcctagactttctttcagatacatgtccacatgtccatttttcaggttctctaagttggagtggagtctgggaagggttgtgaatgaggcttctgggctatgggtgaggttccaatggcaggttagagcccctcgggccaactgccatcctggaaagtagagacagcagtgcccgctgcccagaagagaccagcaagccaaactggagcccccattgcaggctgtcgccatgtggaaagagtaactcacaattgccaataaagtctcatgtggttttatctaaaaaaaaaaaaaaaaaaaaaaaaa

SEQ ID NO: 63 - DNA, 4437 bp, Homo sapiens
gcgcggcggccgtggttgcggcgcgggaagtttggatcctggttccgtccgctaggagtctgcgtgcgaggattatggctgctgttcctcaaaataatctacaggagcaactagaacgtcactcagccagaacacttaataataaattaagtctttcaaaaccaaaattttcaggtttcacttttaaaaagaaaacatcttcagataacaatgtatctgtaactaatgtgtcagtagcaaaaacacctgtattaagaaataaagatgttaatgttaccgaagacttttccttcagtgaacctctacccaacaccacaaatcagcaaagggtcaaggacttctttaaaaatgctccagcaggacaggaaacacagagaggtggatcaaaatcattattgccagatttcttgcagactccgaaggaagttgtatgcactacccaaaacacaccaactgtaaagaaatcccgggatactgctctcaagaaattagaatttagttcttcaccagattctttaagtaccatcaatgattgggatgatatggatgactttgatacttctgagacttcaaaatcatttgttacaccaccccaaagtcactttgtaagagtaagcactgctcagaaatcaaaaaagggtaagagaaacttttttaaagcacagctttatacaacaaacacagtaaagactgatttgcctccaccctcctctgaaagcgagcaaatagatttgactgaggaacagaaggatgactcagaatggttaagcagcgatgtgatttgcatcgatgatggccccattgctgaagtgcatataaatgaagatgctcaggaaagtgactctctgaaaactcatttggaagatgaaagagataatagcgaaaagaagaagaatttggaagaagctgaattacattcaactgagaaagttccatgtattgaatttgatgatgatgattatgatacggattttgttccaccttctccagaagaaattatttctgcttcttcttcctcttcaaaatgccttagtacgttaaaggaccttgacacatctgacagaaaagaggatgttcttagcacatcaaaagatcttttgtcaaaacctgagaaaatgagtatgcaggagctgaatccagaaaccagcacagactgtgacgctagacagataagtttacagcagcagcttattcatgtgatggagcacatctgtaaattaattgatactattcctgatgataaactgaaacttttggattgtgggaacgaactgcttcagcagcggaacataagaaggaaacttctaacggaagtagattttaataaaagtgatgccagtcttcttggctcattgtggagatacaggcctgattcacttgatggccctatggagggtgattcctgccctacagggaattctatgaaggagttaaatttttcacaccttccctcaaattctgtttctcctggggactgtttactgactaccaccctaggaaagacaggattctctgccaccaggaagaatctttttgaaaggcctttattcaatacccatttacagaagtcctttgtaagtagcaactgggctgaaacaccaagactaggaaaaaaaaatgaaagctcttatttcccaggaaatgttctcacaagcactgctgtgaaagatcagaataaacatactgcttcaataaatgacttagaaagagaaacccaaccttcctatgatattgataattttgacatagatgactttgatgatgatgatgactgggaagacataatgcataatttagcagccagcaaatcttccacagctgcctatcaacccatcaaggaaggtcggccaattaaatcagtatcagaaagactttcctcagccaagacagactgtcttccagtgtcatctactgctcaaaatataaacttctcagagtcaattcagaattatactgacaagtcagcacaaaatttagcatccagaaatctgaaacatgagcgtttccaaagtcttagttttcctcatacaaaggaaatgatgaagatttttcataaaaaatttggcctgcataattttagaactaatcagctagaggcgatcaatgctgcactgcttggtgaagactgttttatcctgatgccgactggaggtggtaagagtttgtgttaccagctccctgcctgtgtttctcctggggtcactgttgtcatttctcccttgagatcacttatcgtagatcaagtccaaaagctgacttccttggatattccagctacatatctgacaggtgataagactgactcagaagctacaaatatttacctccagttatcaaaaaaagacccaatcataaaacttctatatgtcactccagaaaagatctgtgcaagtaacagactcatttctactctggagaatctctatgagaggaagctcttggcacgttttgttattgatgaagcacattgtgtcagtcagtggggacatgattttcgtcaagattacaaaagaatgaatatgcttcgccagaagtttccttctgttccggtgatggctcttacggccacagctaatcccagggtacagaaggacatcctgactcagctgaagattctcagacctcaggtgtttagcatgagctttaacagacataatctgaaatactatgtattaccgaaaaagcctaaaaaggtggcatttgattgcctagaatggatcagaaagcaccacccatatgattcagggataatttactgcctctccaggcgagaatgtgacaccatggctgacacgttacagagagatgggctcgctgctcttgcttaccatgctggcctcagtgattctgccagagatgaagtgcagcagaagtggattaatcaggatggctgtcaggttatctgtgctacaattgcatttggaatggggattgacaaaccggacgtgcgatttgtgattcatgcatctctccctaaatctgtggagggttactaccaagaatctggcagagctggaagagatggggaaatatctcactgcctgcttttctatacctatcatgatgtgaccagactgaaaagacttataatgatggaaaaagatggaaaccatcatacaagagaaactcacttcaataatttgtatagcatggtacattactgtgaaaatataacggaatgcaggagaatacagcttttggcctactttggtgaaaatggatttaatcctgatttttgtaagaaacacccagatgtttcttgtgataattgctgtaaaacaaaggattataaaacaagagatgtgactgacgatgtgaaaagtattgtaagatttgttcaagaacatagttcatcacaaggaatgagaaatataaaacatgtaggtccttctggaagatttactatgaatatgctggtcgacattttcttggggagtaagagtgcaaaaatccagtcaggtatatttggaaaaggatctgcttattcacgacacaatgccgaaagactttttaaaaagctgatacttgacaagattttggatgaagacttatatatcaatgccaatgaccaggcgatcgcttatgtgatgctcggaaataaagcccaaactgtactaaatggcaatttaaaggtagactttatggaaacagaaaattccagcagtgtgaaaaaacaaaaagcgttagtagcaaaagtgtctcagagggaagagatggttaaaaaatgtcttggagaacttacagaagtctgcaaatctctggggaaagtttttggtgtccattacttcaatatttttaataccgtcactctcaagaagcttgcagaatctttatcttctgatcctgaggttttgcttcaaattgatggtgttactgaagacaaactggaaaaatatggtgcggaagtgatttcagtattacagaaatactctgaatggacatcgccagctgaagacagttccccagggataagcctgtccagcagcagaggccccggaagaagtgccgctgaggagcttgacgaggaaatacccgtatcttcccactactttgcaagtaaaaccagaaatgaaaggaagaggaaaaagatgccagcctcccaaaggtctaagaggagaaaaactgcttccagtggttccaaggcaaagggggggtctgccacatgtagaaagatatcttccaaaacgaaatcctccagcatcattggatccagttcagcctcacatacttctcaagcgacatcaggagccaatagcaaattggggattatggctccaccgaagcctataaatagaccgtttcttaagccttcatatgcattctcataacaaccgaatctcaatgtacatagaccctctttcttgtttgtcagcatctgaccatctgtgactataaagctgttattcttgttataccaaaaaaaaaaaaaaaaaaaaa

SEQ ID NO: 64 - DNA, 7388 bp, Homo sapiens
ggcagtttgtaggtcgcgagggaagcgctgaggatcaggaagggggcactgagtgtccgtgggggaatcctcgtgataggaactggaatatgccttgagggggacactatgtctttaaaaacgtcggctggtcatgaggtcaggagttccagaccagcctgaccaacgtggtgaaactccgtctctactaaaaatacaaaaattagccgggcgtggtgccgctccagctactcaggaggctgaggcaggagaatcgctagaacccgggaggcggaggttgcagtgagccgagatcgcgccattgcactccagcctgggcgacagagcgagactgtctcaaaacaaaacaaaacaaaacaaaacaaaaaacaccggctgttcattggaacagaaagaaatggatttatctgctcttcgcgttgaagaagtacaaaatgtcattaatgctatgcagaaaatcttagagtgtcccatctgtctggagttgatcaaggaacctgtctccacaaagtgtgaccacatattttgcaaattttgcatgctgaaacttctcaaccagaagaaagggccttcacagtgtcctttatgtaagaatgatataaccaaaaggagcctacaagaaagtacgagatttagtcaacttgttgaagagctattgaaaatcatttgtgcttttcagcttgacacaggtttggagtatgcaaacagctataattttgcaaaaaaggaaaataactctcctgaacatctaaaagatgaagtttctatcatccaaagtatgggctacagaaaccgtgccaaaagacttctacagagtgaacccgaaaatccttccttgcaggaaaccagtctcagtgtccaactctctaaccttggaactgtgagaactctgaggacaaagcagcggatacaacctcaaaagacgtctgtctacattgaattgggatctgattcttctgaagataccgttaataaggcaacttattgcagtgtgggagatcaagaattgttacaaatcacccctcaaggaaccagggatgaaatcagtttggattctgcaaaaaaggctgcttgtgaattttctgagacggatgtaacaaatactgaacatcatcaacccagtaataatgatttgaacaccactgagaagcgtgcagctgagaggcatccagaaaagtatcagggtagttctgtttcaaacttgcatgtggagccatgtggcacaaatactcatgccagctcattacagcatgagaacagcagtttattactcactaaagacagaatgaatgtagaaaaggctgaattctgtaataaaagcaaacagcctggcttagcaaggagccaacataacagatgggctggaagtaaggaaacatgtaatgataggcggactcccagcacagaaaaaaaggtagatctgaatgctgatcccctgtgtgagagaaaagaatggaataagcagaaactgccatgctcagagaatcctagagatactgaagatgttccttggataacactaaatagcagcattcagaaagttaatgagtggttttccagaagtgatgaactgttaggttctgatgactcacatgatggggagtctgaatcaaatgccaaagtagctgatgtattggacgttctaaatgaggtagatgaatattctggttcttcagagaaaatagacttactggccagtgatcctcatgaggctttaatatgtaaaagtgaaagagttcactccaaatcagtagagagtaatattgaagacaaaatatttgggaaaacctatcggaagaaggcaagcctccccaacttaagccatgtaactgaaaatctaattataggagcatttgttactgagccacagataatacaagagcgtcccctcacaaataaattaaagcgtaaaaggagacctacatcaggccttcatcctgaggattttatcaagaaagcagatttggcagttcaaaagactcctgaaatgataaatcagggaactaaccaaacggagcagaatggtcaagtgatgaatattactaatagtggtcatgagaataaaacaaaaggtgattctattcagaatgagaaaaatcctaacccaatagaatcactcgaaaaagaatctgctttcaaaacgaaagctgaacctataagcagcagtataagcaatatggaactcgaattaaatatccacaattcaaaagcacctaaaaagaataggctgaggaggaagtcttctaccaggcatattcatgcgcttgaactagtagtcagtagaaatctaagcccacctaattgtactgaattgcaaattgatagttgttctagcagtgaagagataaagaaaaaaaagtacaaccaaatgccagtcaggcacagcagaaacctacaactcatggaaggtaaagaacctgcaactggagccaagaagagtaacaagccaaatgaacagacaagtaaaagacatgacagcgatactttcccagagctgaagttaacaaatgcacctggttcttttactaagtgttcaaataccagtgaacttaaagaatttgtcaatcctagccttccaagagaagaaaaagaagagaaactagaaacagttaaagtgtctaataatgctgaagaccccaaagatctcatgttaagtggagaaagggttttgcaaactgaaagatctgtagagagtagcagtatttcattggtacctggtactgattatggcactcaggaaagtatctcgttactggaagttagcactctagggaaggcaaaaacagaaccaaataaatgtgtgagtcagtgtgcagcatttgaaaaccccaagggactaattcatggttgttccaaagataatagaaatgacacagaaggctttaagtatccattgggacatgaagttaaccacagtcgggaaacaagcatagaaatggaagaaagtgaacttgatgctcagtatttgcagaatacattcaaggtttcaaagcgccagtcatttgctccgttttcaaatccaggaaatgcagaagaggaatgtgcaacattctctgcccactctgggtccttaaagaaacaaagtccaaaagtcacttttgaatgtgaacaaaaggaagaaaatcaaggaaagaatgagtctaatatcaagcctgtacagacagttaatatcactgcaggctttcctgtggttggtcagaaagataagccagttgataatgccaaatgtagtatcaaaggaggctctaggttttgtctatcatctcagttcagaggcaacgaaactggactcattactccaaataaacatggacttttacaaaacccatatcgtataccaccactttttcccatcaagtcatttgttaaaactaaatgtaagaaaaatctgctagaggaaaactttgaggaacattcaatgtcacctgaaagagaaatgggaaatgagaacattccaagtacagtgagcacaattagccgtaataacattagagaaaatgtttttaaagaagccagctcaagcaatattaatgaagtaggttccagtactaatgaagtgggctccagtattaatgaaataggttccagtgatgaaaacattcaagcagaactaggtagaaacagagggccaaaattgaatgctatgcttagattaggggttttgcaacctgaggtctataaacaaagtcttcctggaagtaattgtaagcatcctgaaataaaaaagcaagaatatgaagaagtagttcagactgttaatacagatttctctccatatctgatttcagataacttagaacagcctatgggaagtagtcatgcatctcaggtttgttctgagacacctgatgacctgttagatgatggtgaaataaaggaagatactagttttgctgaaaatgacattaaggaaagttctgctgtttttagcaaaagcgtccagaaaggagagcttagcaggagtcctagccctttcacccatacacatttggctcagggttaccgaagaggggccaagaaattagagtcctcagaagagaacttatctagtgaggatgaagagcttccctgcttccaacacttgttatttggtaaagtaaacaatataccttctcagtctactaggcatagcaccgttgctaccgagtgtctgtctaagaacacagaggagaatttattatcattgaagaatagcttaaatgactgcagtaaccaggtaatattggcaaaggcatctcaggaacatcaccttagtgaggaaacaaaatgttctgctagcttgttttcttcacagtgcagtgaattggaagacttgactgcaaatacaaacacccaggatcctttcttgattggttcttccaaacaaatgaggcatcagtctgaaagccagggagttggtctgagtgacaaggaattggtttcagatgatgaagaaagaggaacgggcttggaagaaaataatcaagaagagcaaagcatggattcaaacttaggtgaagcagcatctgggtgtgagagtgaaacaagcgtctctgaagactgctcagggctatcctctcagagtgacattttaaccactcagcagagggataccatgcaacataacctgataaagctccagcaggaaatggctgaactagaagctgtgttagaacagcatgggagccagccttctaacagctacccttccatcataagtgactcttctgcccttgaggacctgcgaaatccagaacaaagcacatcagaaaaagcagtattaacttcacagaaaagtagtgaataccctataagccagaatccagaaggcctttctgctgacaagtttgaggtgtctgcagatagttctaccagtaaaaataaagaaccaggagtggaaaggtcatccccttctaaatgcccatcattagatgataggtggtacatgcacagttgctctgggagtcttcagaatagaaactacccatctcaagaggagctcattaaggttgttgatgtggaggagcaacagctggaagagtctgggccacacgatttgacggaaacatcttacttgccaaggcaagatctagagggaaccccttacctggaatctggaatcagcctcttctctgatgaccctgaatctgatccttctgaagacagagccccagagtcagctcgtgttggcaacataccatcttcaacctctgcattgaaagttccccaattgaaagttgcagaatctgcccagagtccagctgctgctcatactactgatactgctgggtataatgcaatggaagaaagtgtgagcagggagaagccagaattgacagcttcaacagaaagggtcaacaaaagaatgtccatggtggtgtctggcctgaccccagaagaatttatgctcgtgtacaagtttgccagaaaacaccacatcactttaactaatctaattactgaagagactactcatgttgttatgaaaacagatgctgagtttgtgtgtgaacggacactgaaatattttctaggaattgcgggaggaaaatgggtagttagctatttctgggtgacccagtctattaaagaaagaaaaatgctgaatgagcatgattttgaagtcagaggagatgtggtcaatggaagaaaccaccaaggtccaaagcgagcaagagaatcccaggacagaaagatcttcagggggctagaaatctgttgctatgggcccttcaccaacatgcccacagatcaactggaatggatggtacagctgtgtggtgcttctgtggtgaaggagctttcatcattcacccttggcacaggtgtccacccaattgtggttgtgcagccagatgcctggacagaggacaatggcttccatgcaattgggcagatgtgtgaggcacctgtggtgacccgagagtgggtgttggacagtgtagcactctaccagtgccaggagctggacacctacctgataccccagatcccccacagccactactgactgcagccagccacaggtacagagccacaggaccccaagaatgagcttacaaagtggcctttccaggccctgggagctcctctcactcttcagtccttctactgtcctggctactaaatattttatgtacatcagcctgaaaaggacttctggctatgcaagggtcccttaaagattttctgcttgaagtctcccttggaaatctgccatgagcacaaaattatggtaatttttcacctgagaagattttaaaaccatttaaacgccaccaattgagcaagatgctgattcattatttatcagccctattctttctattcaggctgttgttggcttagggctggaagcacagagtggcttggcctcaagagaatagctggtttccctaagtttacttctctaaaaccctgtgttcacaaaggcagagagtcagacccttcaatggaaggagagtgcttgggatcgattatgtgacttaaagtcagaatagtccttgggcagttctcaaatgttggagtggaacattggggaggaaattctgaggcaggtattagaaatgaaaaggaaacttgaaacctgggcatggtggctcacgcctgtaatcccagcactttgggaggccaaggtgggcagatcactggaggtcaggagttcgaaaccagcctggccaacatggtgaaaccccatctctactaaaaatacagaaattagccggtcatggtggtggacacctgtaatcccagctactcaggtggctaaggcaggagaatcacttcagcccgggaggtggaggttgcagtgagccaagatcataccacggcactccagcctgggtgacagtgagactgtggctcaaaaaaaaaaaaaaaaaaaggaaaatgaaactagaagagatttctaaaagtctgagatatatttgctagatttctaaagaatgtgttctaaaacagcagaagattttcaagaaccggtttccaaagacagtcttctaattcctcattagtaataagtaaaatgtttattgttgtagctctggtatataatccattcctcttaaaatataagacctctggcatgaatatttcatatctataaaatgacagatcccaccaggaaggaagctgttgctttctttgaggtgatttttttcctttgctccctgttgctgaaaccatacagcttcataaataattttgcttgctgaaggaagaaaaagtgtttttcataaacccattatccaggactgtttatagctgttggaaggactaggtcttccctagcccccccagtgtgcaagggcagtgaagacttgattgtacaaaatacgttttgtaaatgttgtgctgttaacactgcaaataaacttggtagcaaacacttcaaaaaaaaaaaaaaaaaa

SEQ ID NO: 65 - DNA, 4495 bp, Homo sapiens
gccggcgacgtcacgcggccgttacggcgctcaggcgtctcgacgcgcgcgatttaaaaccagctcaggagacgccaaggaaagatgggacctcccggcccagcactgccagccacaatgaataactcttcttcagagacgcgaggacacccccacagtgcctcctctccttcagagcgtgtgttcccgatgcccctgcccaggaaggcgcctctcaatattcctggcaccccagtcctcgaagactttcctcagaatgacgatgagaaggagcggctgcagcggaggcgctcgagggtctttgatctgcagttcagcactgactcacctcgcttattggcctccccctccagcaggagtattgacatttcagctactatccccaagtttacaaacacgcagattacggaacattactccacctgtatcaaactgtccactgaaaataaaatcactaccaagaatgcttttggtttgcacttgattgattttatgtcagagattcttaaacagaaagacaccgaaccaaccaactttaaagtggctgcgggtactctggatgccagcaccaagatctatgctgtgcgcgtggatgccgtccatgccgatgtatacagagtccttggggggctgggcaaagatgcaccgtctttggaagaagtagaaggccatgttgctgatggaagtgctactgaaatgggaacaaccaaaaaggctgtaaagccaaagaagaagcacttacacagaactattgagcagaacataaacaacctcaatgtctccgaagcagatcggaagtgtgagattgatcccatgtttcagaagacagcagcctcatttgatgagtgcagcacagcaggggtgtttctgtccactctccactgccaggactacagaagtgaactgctgtttccctctgatgtccagactctctccacgggagaacctctcgagttgccagagttaggttgtgtagaaatgacagatttaaaagcgcccttgcagcagtgtgcagaagatcgccagatctgcccttccctggccgggttccagtttacacagtgggacagtgaaacacataatgagtctgtgtcggccctggtagacaagtttaagaagaatgaccaggtatttgacatcaatgctgaagttgacgagagtgactgtggagacttccccgatgggtccctgggggatgactttgatgccaacgatgaacctgaccacaccgcagttggggatcatgaagagttcaggagctggaaggagccctgccaggttcagagctgccaggaagaaatgatttcccttggggatggagacatcaggaccatgtgcccccttctgtctatgaaacctggagaatattcttatttcagtcctcggaccatgtcgatgtgggctggcccggatcactggcgctttaggcctcgacgcaaacaagatgctccttcccaatcagaaaacaaaaagaagagtacaaaaaaagattttgaaattgactttgaagatgatattgactttgatgtatattttagaaaaacaaaggctgctactattctgaccaagtccactttggagaaccagaattggagagctaccacccttcctacagatttcaactacaatgttgacactctggtccagcttcacctcaaaccaggcaccaggttacttaagatggcccagggccatagggtagagactgagcattatgaagaaattgaagactatgattacaacaaccctaacgacacctccaacttttgccctggattacaggctgctgacagtgatgatgaagatttggatgacttatttgtgggacctgttgggaactctgacctctcaccttatccttgccatccacctaagacagcacaacagaatggtgacactccagaagcccaaggattagacatcacaacatatggggagtcaaacttggtagctgagcctcagaaggtaaataaaattgaaattcactatgccaagactgccaaaaagatggacatgaagaaactgaagcagagcatgtggagtctgctgacagcgctctccggaaaggaggcagatgcagaggcaaaccacagggaagctggaaaagaagcggccctggcagaagtggctgacgagaagatgcttagcgggctcacgaaggacctgcagaggagcctgccccctgtcatggctcagaacctctccatacctctggcttttgcctgtctcctacatttagccaatgaaaagaatctaaaactggaaggaacagaggacctctctgatgttcttgtgaggcaaggagattgagttcactatggagaagtcagcagcaggaggcccatcccttactcagttgccgggacatccccagtctcgggggaagaagatgccatgggcttatacccaggctgtagccaactaccaacgtgcctgtttgtttgttgctctttccttctctccatcatagtctgggtgccagcgccctgaagctccgtgctcaactgattaaactttactgccctatggtgaccatctaggagaggggagggcagagggggtgagggtactattctggattgagaaaacctatatccattctttatatcaatgtatagttttagtctcctaaattgatctgttattttccaaactattctcttgtagaaaattttccagtgggcacttaatggtgcccttgaagaacttcctaatccatgtacataaaatacatcatatgtacacttataaatgtatatagaatgctcaaaaataaaattcttaataatagaactggcaaaatatttgagtgtccactagatgagtatcagacctagtccttacccttagggggatgcagtcctggttgttatccaggatacacacctgtcagtataaggcagaagatgcctaagggccaagatggtttgcctcggaggagaatggaagagagagattgctgactggacattcagatgcaagactgggtcctgcttaaatcccaggattctgctggagggagctgatagtgatacttgtcccttctgtacattgcttcatgtagccttctcagcatccctaggagaaacttactattgtgactctcatgttggaggaggaaacggacacccaaggtagaggaacttgcaaaagggcagccggcaaactgtcaggggtggcctgagcctggcaatctgcctccagagtctgctctcggccattgtgctatgtgctacctggataggtcatacaggctcagcagtgggtggagagcagtgctcagatttgtccatctccacagaatgcagcacacacacaaatgtacaagttcttcccctaacctcagaggaataggggaattaactttgcttgcaatttggaacaatattatagatgttgatccaagtagttctgttactggctggtcctggatctctgccagaacacccgtcatcattgactggctaaatagagatcttggatataggccagaagcagtgaagtatataattggaaattgctcctgataataacttccttcttagccaaaaaccacacaaaacaaaaataatcccctccccacaggaatatgctttccaaattgtgtccaaaacattacctgctctgttatattgagaaggttagagacttcagagcatgcttagaaaaagcagtggtgccacaggtgagactccacactctgtcttgctggggctgaagcctccatcactttcccaggccaggttagtgctgggcttcttgctttccttctattcctgagagtagaactggctaagcccattccttccctcagtcagccccacttctctatagtgggttctgggggtggggggctgaattaccagtaaaactagaaagattgggaccaagtgcagtggcccacacctgtaaatcctagcgctttgaaaggaagaggcaggaggattgcttgaagtcaggagttcaagaccagcctgggcaaaatagaaccccatctttaaaaaaaaagtttaaaaattagccaggtacggaggtgtgtgcctgtaatcccagctactcagaaggctgaggtgggataatcacttgagcccaggagtttgaggctgcagtgagctgtgatcacactactgcattccagccaggacaacagagtgagatcctatctcttaaacaaaaaaaaaaactggcgagttcaataccaacttctacaatgaaatccccttccccccacaaccctgcttctcctaagtttccctcattacatggttgctgtgggctatgtgtgctgtggtctgaatgtttgtgtctaaaattcacatgttggtattaagagatagggcctttgggaggtgattaggttatgagggcagatccctcgtgaatgggattagtgctcttataaaagaggcctgaggaagcttgttcgttcctcttgcccttctgccatgtaaggatgcaatgagaaggcaccatctgtgagcaaggagcccctcac

SEQ ID NO: 66 - DNA, 3486 bp, Homo sapiens
gagccgactgcggctgcgcggggtattcgaatcggcggcggcttctagtttgcggttcaggtttggccgctgccggccagcgtcctctggccatggacaccccggaaaatgtccttcagatgcttgaagcccacatgcagagctacaagggcaatgaccctcttggtgaatgggaaagatacatacagtgggtagaagagaattttcctgagaataaagaatacttgataactttactagaacatttaatgaaggaatttttagataagaagaaataccacaatgacccaagattcatcagttattgtttaaaatttgctgagtacaacagtgacctccatcaattttttgagtttctgtacaaccatgggattggaaccctgtcatcccctctgtacattgcctgggcggggcatctggaagcccaaggagagctgcagcatgccagtgctgtccttcagagaggaattcaaaaccaggctgaacccagagagttcctgcaacaacaatacaggttatttcagacacgcctcactgaaacccatttgccagctcaagctagaacctcagaacctctgcataatgttcaggttttaaatcaaatgataacatcaaaatcaaatccaggaaataacatggcctgcatttctaagaatcagggttcagagctttctggagtgatatcttcagcttgtgataaagagtcaaatatggaacgaagagtgatcacgatttctaaatcagaatattctgtgcactcatctttggcatccaaagttgatgttgagcaggttgttatgtattgcaaggagaagcttattcgtggggaatcagaattttcctttgaagaattgagagcccagaaatacaatcaacggagaaagcatgagcaatgggtaaatgaagacagacattatatgaaaaggaaagaagcaaatgcttttgaagaacagctattaaaacagaaaatggatgaacttcataagaagttgcatcaggtggtggagacatcccatgaggatctgcccgcttcccaggaaaggtccgaggttaatccagcacgtatggggccaagtgtaggctcccagcaggaactgagagcgccatgtcttccagtaacctatcagcagacaccagtgaacatggaaaagaacccaagagaggcacctcctgttgttcctcctttggcaaatgctatttctgcagctttggtgtccccagccaccagccagagcattgctcctcctgttcctttgaaagcccagacagtaacagactccatgtttgcagtggccagcaaagatgctggatgtgtgaataagagtactcatgaattcaagccacagagtggagcagagatcaaagaagggtgtgaaacacataaggttgccaacacaagttcttttcacacaactccaaacacatcactgggaatggttcaggcaacgccatccaaagtgcagccatcacccaccgtgcacacaaaagaagcattaggtttcatcatgaatatgtttcaggctcctacacttcctgatatttctgatgacaaagatgaatggcaatctctagatcaaaatgaagatgcatttgaagcccagtttcaaaaaaatgtaaggtcatctggggcttggggagtcaataagatcatctcttctttgtcatctgcttttcatgtgtttgaagatggaaacaaagaaaattatggattaccacagcctaaaaataaacccacaggagccaggacctttggagaacgctctgtcagcagacttccttcaaaaccaaaggaggaagtgcctcatgctgaagagtttttggatgactcaactgtatggggtattcgctgcaacaaaaccctggcacccagtcctaagagcccaggagacttcacatctgctgcacaacttgcgtctacaccattccacaagcttccagtggagtcagtgcacattttagaagataaagaaaatgtggtagcaaaacagtgtacccaggcgactttggattcttgtgaggaaaacatggtggtgccttcaagggatggaaaattcagtccaattcaagagaaaagcccaaaacaggccttgtcgtctcacatgtattcagcatccttacttcgtctgagccagcctgctgcaggtggggtacttacctgtgaggcagagttgggcgttgaggcttgcagactcacagacactgacgctgccattgcagaagatccaccagatgctattgctgggctccaagcagaatggatgcagatgagttcacttgggactgttgatgctccaaacttcattgttgggaacccatgggatgataagctgattttcaaacttttatctgggctttctaaaccagtgagttcctatccaaatacttttgaatggcaatgtaaacttccagccatcaagcccaagactgaatttcaattgggttctaagctggtctatgtccatcaccttcttggagaaggagcctttgcccaggtgtacgaagctacccagggagatctgaatgatgctaaaaataaacagaaatttgttttaaaggtccaaaagcctgccaacccctgggaattctacattgggacccagttgatggaaagactaaagccatctatgcagcacatgtttatgaagttctattctgcccacttattccagaatggcagtgtattagtaggagagctctacagctatggaacattattaaatgccattaacctctataaaaatacccctgaaaaagtgatgcctcaaggtcttgtcatctcttttgctatgagaatgctttacatgattgagcaagtgcatgactgtgaaatcattcatggagacattaaaccagacaatttcatacttggaaacggatttttggaacaggatgatgaagatgatttatctgctggcttggcactgattgacctgggtcagagtatagatatgaaactttttccaaaaggaactatattcacagcaaagtgtgaaacatctggttttcagtgtgttgagatgctcagcaacaaaccatggaactaccagatcgattactttggggttgctgcaacagtatattgcatgctctttggcacttacatgaaagtgaaaaatgaaggaggagagtgtaagcctgaaggtctttttagaaggcttcctcatttggatatgtggaatgaattttttcatgttatgttgaatattccagattgtcatcatcttccatctttggatttgttaaggcaaaagctgaagaaagtatttcaacaacactatactaacaagattagggccctacgtaataggctaattgtactgctcttagaatgtaagcgttcacgaaaataaaatttggatatagacagtccttaaaaatcacactgtaaatatgaatctgctcactttaaacctgtttttttttcatttattgtttatgtaaatgtttgttaaaaataaatcccatggaatatttccatgtaaaaaa

SEQ ID NO: 67 - DNA, 3721 bp, Homo sapiens
accgttaaatttgaaacttggcggctaggggtgtgggcttgaggtggccggtttgttagggagtcgtgtacgtgccttggtcgcttctgtagctccgagggcaggttgcggaagaaagcccaggcggtctgtggcccagaggaaaggcctgcagcaggacgaggacctgagccaggaatgcaggatggcggcggtgaagaaggaagggggtgctctgagtgaagccatgtccctggagggagatgaatgggaactgagtaaagaaaatgtacaacctttaaggcaagggcggatcatgtccacgcttcagggagcactggcacaagaatctgcctgtaacaatactcttcagcagcagaaacgggcatttgaatatgaaattcgattttacactggaaatgaccctctggatgtttgggataggtatatcagctggacagagcagaactatcctcaaggtgggaaggagagtaatatgtcaacgttattagaaagagctgtagaagcactacaaggagaaaaacgatattatagtgatcctcgatttctcaatctctggcttaaattagggcgtttatgcaatgagcctttggatatgtacagttacttgcacaaccaagggattggtgtttcacttgctcagttctatatctcatgggcagaagaatatgaagctagagaaaactttaggaaagcagatgcgatatttcaggaagggattcaacagaaggctgaaccactagaaagactacagtcccagcaccgacaattccaagctcgagtgtctcggcaaactctgttggcacttgagaaagaagaagaggaggaagtttttgagtcttctgtaccacaacgaagcacactagctgaactaaagagcaaagggaaaaagacagcaagagctccaatcatccgtgtaggaggtgctctcaaggctccaagccagaacagaggactccaaaatccatttcctcaacagatgcaaaataatagtagaattactgtttttgatgaaaatgctgatgaggcttctacagcagagttgtctaagcctacagtccagccatggatagcaccccccatgcccagggccaaagagaatgagctgcaagcaggcccttggaacacaggcaggtccttggaacacaggcctcgtggcaatacagcttcactgatagctgtacccgctgtgcttcccagtttcactccatatgtggaagagactgcacaacagccagttatgacaccatgtaaaattgaacctagtataaaccacatcctaagcaccagaaagcctggaaaggaagaaggagatcctctacaaagggttcagagccatcagcaagcgtctgaggagaagaaagagaagatgatgtattgtaaggagaagatttatgcaggagtaggggaattctcctttgaagaaattcgggctgaagttttccggaagaaattaaaagagcaaagggaagccgagctattgaccagtgcagagaagagagcagaaatgcagaaacagattgaagagatggagaagaagctaaaagaaatccaaactactcagcaagaaagaacaggtgatcagcaagaagagacgatgcctacaaaggagacaactaaactgcaaattgcttccgagtctcagaaaataccaggaatgactctatccagttctgtttgtcaagtaaactgttgtgccagagaaacttcacttgcggagaacatttggcaggaacaacctcattctaaaggtcccagtgtacctttctccatttttgatgagtttcttctttcagaaaagaagaataaaagtcctcctgcagatcccccacgagttttagctcaacgaagaccccttgcagttctcaaaacctcagaaagcatcacctcaaatgaagatgtgtctccagatgtttgtgatgaatttacaggaattgaacccttgagcgaggatgccattatcacaggcttcagaaatgtaacaatttgtcctaacccagaagacacttgtgactttgccagagcagctcgttttgtatccactccttttcatgagataatgtccttgaaggatctcccttctgatcctgagagactgttaccggaagaagatctagatgtaaagacctctgaggaccagcagacagcttgtggcactatctacagtcagactctcagcatcaagaagctgagcccaattattgaagacagtcgtgaagccacacactcctctggcttctctggttcttctgcctcggttgcaagcacctcctccatcaaatgtcttcaaattcctgagaaactagaacttactaatgagacttcagaaaaccctactcagtcaccatggtgttcacagtatcgcagacagctactgaagtccctaccagagttaagtgcctctgcagagttgtgtatagaagacagaccaatgcctaagttggaaattgagaaggaaattgaattaggtaatgaggattactgcattaaacgagaatacctaatatgtgaagattacaagttattctgggtggcgccaagaaactctgcagaattaacagtaataaaggtatcttctcaacctgtcccatgggacttttatatcaacctcaagttaaaggaacgtttaaatgaagattttgatcatttttgcagctgttatcaatatcaagatggctgtattgtttggcaccaatatataaactgcttcacccttcaggatcttctccaacacagtgaatatattacccatgaaataacagtgttgattatttataaccttttgacaatagtggagatgctacacaaagcagaaatagtccatggtgacttgagtccaaggtgtctgattctcagaaacagaatccacgatccctatgattgtaacaagaacaatcaagctttgaagatagtggacttttcctacagtgttgaccttagggtgcagctggatgtttttaccctcagcggctttcggactgtacagatcctggaaggacaaaagatcctggctaactgttcttctccctaccaggtagacctgtttggtatagcagatttagcacatttactattgttcaaggaacacctacaggtcttctgggatgggtccttctggaaacttagccaaaatatttctgagctaaaagatggtgaattgtggaataaattctttgtgcggattctgaatgccaatgatgaggccacagtgtctgttcttggggagcttgcagcagaaatgaatggggtttttgacactacattccaaagtcacctgaacaaagccttatggaaggtagggaagttaactagtcctggggctttgctctttcagtgagctaggcaatcaagtctcacagattgctgcctcagagcaatggttgtattgtggaacactgaaactgtatgtgctgtaatttaatttaggacacatttagatgcactaccattgctgttctactttttggtacaggtatattttgacgtcactgatattttttatacagtgatatacttactcatggccttgtctaacttttgtgaagaactattttattctaaacagactcattacaaatggttaccttgttatttaacccatttgtctctacttttccctgtacttttcccatttgtaatttgtaaaatgttctcttatgatcaccatgtattttgtaaataataaaatagtatctgttaaatttgtgcttctaaaaaaaaa

SEQ ID NO: 68 - DNA, 2813 bp, Homo sapiens
agggaatcttatgaacagaaccaggacagggaggctggccggaggttcctgcagagggagcgtcaaggccctgtgctgctgtccctgggggccagaggggttgcccagcatgcccactggcaggagagagggaactgacccacttgctcctaccagcttctgaaggtgacactgagccccaggtgacgccgcaccaccaaagaaggtgcttgtgtttgtcagacaaatacagccaggcctgccaccccttaggctccaaagtccggaggtgcagaaagccaggaccaagagacaggcagctcaccagggtggacaaatcgccagagatgtggtgcattgtcctgttttcacttttggcatgggtttatgctgagcctaccatgtatggggagatcctgtcccctaactatcctcaggcatatcccagtgaggtagagaaatcttgggacatagaagttcctgaagggtatgggattcacctctacttcacccatctggacattgagctgtcagagaactgtgcgtatgactcagtgcagataatctcaggagacactgaagaagggaggctctgtggacagaggagcagtaacaatccccactctccaattgtggaagagttccaagtcccatacaacaaactccaggtgatctttaagtcagacttttccaatgaagagcgttttacggggtttgctgcatactatgttgccacagacataaatgaatgcacagattttgtagatgtcccttgtagccacttctgcaacaatttcattggtggttacttctgctcctgccccccggaatatttcctccatgatgacatgaagaattgcggagttaattgcagtggggatgtattcactgcactgattggggagattgcaagtcccaattatcccaaaccatatccagagaactcaaggtgtgaataccagatccggttggagaaagggttccaagtggtggtgaccttgcggagagaagattttgatgtggaagcagctgactcagcgggaaactgccttgacagtttagtttttgttgcaggagatcggcaatttggtccttactgtggtcatggattccctgggcctctaaatattgaaaccaagagtaatgctcttgatatcatcttccaaactgatctaacagggcaaaaaaagggctggaaacttcgctatcatggagatccaatgccctgccctaaggaagacactcccaattctgtttgggagcctgcgaaggcaaaatatgtctttagagatgtggtgcagataacctgtctggatgggtttgaagttgtggagggacgtgttggtgcaacatctttctattcgacttgtcaaagcaatggaaagtggagtaattccaaactgaaatgtcaacctgtggactgtggcattcctgaatccattgagaatggtaaagttgaagacccagagagcactttgtttggttctgtcatccgctacacttgtgaggagccatattactacatggaaaatggaggaggtggggagtatcactgtgctggtaacgggagctgggtgaatgaggtgctgggcccggagctgccgaaatgtgttccagtctgtggagtccccagagaaccctttgaagaaaaacagaggataattggaggatccgatgcagatattaaaaacttcccctggcaagtcttctttgacaacccatgggctggtggagcgctcattaatgagtactgggtgctgacggctgctcatgttgtggagggaaacagggagccaacaatgtatgttgggtccacctcagtgcagacctcacggctggcaaaatccaagatgctcactcctgagcatgtgtttattcatccgggatggaagctgctggaagtcccagaaggacgaaccaattttgataatgacattgcactggtgcggctgaaagacccagtgaaaatgggacccaccgtctctcccatctgcctaccaggcacctcttccgactacaacctcatggatggggacctgggactgatctcaggctggggccgaacagagaagagagatcgtgctgttcgcctcaaggcggcaaggttacctgtagctcctttaagaaaatgcaaagaagtgaaagtggagaaacccacagcagatgcagaggcctatgttttcactcctaacatgatctgtgctggaggagagaagggcatggatagctgtaaaggggacagtggtggggcctttgctgtacaggatcccaatgacaagaccaaattctacgcagctggcctggtgtcctgggggccccagtgtgggacctatgggctctacacacgggtaaagaactatgttgactggataatgaagactatgcaggaaaatagcaccccccgtgaggactaatccagatacatcccaccagcctctccaagggtggtgaccaatgcattaccttctgttccttatgatattctcattatttcatcatgactgaaagaagacacgagcgaatgatttaaatagaacttgattgttgagacgccttgctagaggtagagtttgatcatagaattgtgctggtcatacatttgtggtctgactccttggggtcctttccccggagtacctattgtagataacactatgggtggggcactcctttcttgcactattccacagggataccttaattctttgtttcctctttacctgttcaaaattccatttacttgatcattctcagtatccactgtctatgtacaataaaggatgtttataagcaaaaaaaaaaaaaaaaaaaaaaaaaaaaaaaaaaaaaaaaaa

SEQ ID NO: 69 - DNA, 7108 bp, Homo sapiens
gcgcgcccgaggctcctacgctgccgcgcccggcttctctccagcgccccgcgccgttagccacgtggaccgactccggcgcgccgtcctcacgtggttccagtggagtttgcagtccttcccgcttctccgtactcgcccccgcctctgagctcccttcccatggcggccctagtgttggaggacgggtcggtcctgcggggccagccctttggggccgccgtgtcgactgccggggaagtggtgtttcaaaccggcatggtcggctaccccgaggccctcactgatccctcctacaaggcacagatcttagtgctcacctatcctctgatcggcaactatggcatccccccagatgaaatggatgagttcggtctctgcaagtggtttgaatcctcgggcatccacgtagcagcactggtagtgggagagtgctgtcctactcccagccactggagtgccacccgcaccctgcatgagtggctgcagcagcatggcatccctggcttgcaaggagtagacactcgggagctgaccaagaagttgcgggaacaggggtctctgctggggaagctggtccagaatggaacagaaccttcatccctgccattcttggaccccaatgcccgccccctggtaccagaggtctccattaagactccacgggtattcaatacagggggtgcccctcggatccttgctttggactgtggcctcaagtataatcagatccgatgcctctgccagcgtggggctgaggtcactgtggtaccctgggaccatgcactagacagccaagagtatgagggtctcttcttaagtaatgggcctggtgaccctgcctcctatcccagtgtcgtatccacactgagccgtgttttatctgagcctaatccccgacctgtctttgggatctgcctgggacaccagctattggccttagccattggggccaagacttacaagatgagatatgggaaccgaggccataaccagccctgcttgttggtgggctctgggcgctgctttctgacatcccagaaccatgggtttgctgtggagacagactcactgccagcagactgggctcctctcttcaccaacgccaatgatggttccaatgaaggcattgtgcacaacagcttgcctttcttcagtgtccagtttcacccagagcaccaagctggcccttcagatatggaactgcttttcgatatctttctggaaactgtgaaagaggccacagctgggaaccctgggggccagacagttagagagcggctgactgagcgcctctgtccccctgggattcccactcccggctctggacttccaccaccacgaaaggttctgatcctgggctcagggggcctctccattggccaagctggagaatttgactactcgggctctcaggcaattaaggccctgaaggaggaaaacatccagacgttgctgatcaaccccaatattgccacagtgcagacctcccaggggctggccgacaaggtctattttcttcccataacacctcattatgtaacccaggtgatacgtaatgaacgccccgatggtgtgttactgacttttgggggccagactgctctgaactgtggtgtggagctgaccaaggccggggtgctggctcggtatggggtccgggtcctgggcacaccagtggagaccattgagctgaccgaggatcgacgggcctttgctgccagaatggcagagatcggagagcatgtggccccgagcgaggcagcaaattctcttgaacaggcccaggcagccgctgaacggctggggtaccctgtgctagtgcgtgcagcctttgccctgggtggcctgggctctggctttgcctctaacagggaggagctctctgctctcgtggccccagcttttgcccataccagccaagtgctagtagacaagtctctgaagggatggaaggagattgagtacgaggtggtgagagacgcctatggcaactgtgtcacggtgtgtaacatggagaacttggacccactgggcatccacactggtgagtccatagtggtggcccctagccagacactgaatgacagggagtatcagctcctgaggcagacagctatcaaggtgacccagcacctgggaattgttggggagtgcaatgtgcagtatgccttgaaccctgagtctgagcagtattacatcattgaagtgaatgccaggctctctcgcagctctgccctggccagtaaggccacaggttatccactggcttatgtggcagccaagctagcattgggcatccctttgcctgagctcaggaactctgtgacagggggtacagcagcctttgaacccagcgtggattattgtgtggtgaagattcctcgatgggaccttagcaagttcctgcgagtcagcacaaagattgggagctgcatgaagagcgttggtgaagtcatgggcattgggcgttcatttgaggaggccttccagaaggccctgcgcatggtggatgagaactgtgtgggctttgatcacacagtgaaaccagtcagcgatatggagttggagactccaacagataagcggatttttgtggtggcagctgctttgtgggctggttattcagtggaccgcctgtatgagctcacacgcatcgaccgctggttcctgcaccgaatgaagcgtatcatcgcacatgcccagctgctagaacaacaccgtggacagcctttgccgccagacctgctgcaacaggccaagtgtcttggcttctcagacaaacagattgcccttgcagttctgagcacagagctggctgttcgcaagctgcgtcaggaactggggatctgtccagcagtgaaacagattgacacagttgcagctgagtggccagcccagacaaattacctatacctaacgtattggggcaccacccatgacctcacctttcgaacacctcatgtcctagtccttggctctggcgtctaccgtattggctctagcgttgaatttgactggtgtgctgtaggctgcatccagcagctccgaaagatgggatataagaccatcatggtgaactataacccagagacagtcagcaccgactatgacatgtgtgatcgactctactttgatgagatctcttttgaggtggtgatggacatctatgagctcgagaaccctgaaggtgtgatcctatccatgggtggacagctgcccaacaacatggccatggcgttgcatcggcagcagtgccgggtgctgggcacctcccctgaagccattgactcggctgagaaccgtttcaagttttcccggctccttgacaccattggtatcagccagcctcagtggagggagctcagtgacctcgagtctgctcgccaattctgccagaccgtggggtacccctgtgtggtgcgcccctcctatgtgctgagcggtgctgctatgaatgtggcctacacggatggagacctggagcgcttcctgagcagcgcagcagccgtctccaaagagcatcccgtggtcatctccaagttcatccaggaggctaaggagattgacgtggatgccgtggcctctgatggtgtggtggcagccatcgccatctctgagcatgtggagaatgcaggtgtgcattcaggtgatgcgacgctggtgacccccccacaagatatcactgccaaaaccctggagcggatcaaagccattgtgcatgctgtgggccaggagctacaggtcacaggacccttcaatctgcagctcattgccaaggatgaccagctgaaagttattgaatgcaacgtacgtgtctctcgctccttccccttcgtttccaagacactgggtgtggacctagtagccttggccacgcgggtcatcatgggggaagaagtggaacctgtggggctaatgactggttctggagtcgtgggagtaaaggtgcctcagttctccttctcccgcttggcgggtgctgacgtggtgttgggtgtggaaatgaccagtactggggaggtggccggctttggggagagccgctgtgaggcatacctcaaggccatgctaagcactggctttaagatccccaagaagaatatcctgctgaccattggcagctataagaacaaaagcgagctgctcccaactgtgcggctactggagagcctgggctacagcctctatgccagtctcggcacagctgacttctacactgagcatggcgtcaaggtaacagctgtggactggcactttgaggaggctgtggatggtgagtgcccaccacagcggagcatcctggagcagctagctgagaaaaactttgagctggtgattaacctgtcaatgcgtggagctgggggccggcgtctctcttcctttgtcaccaagggctaccgcacccgacgcttggccgctgacttctccgtgcccctaatcatcgatatcaagtgcaccaaactctttgtggaggccctaggccagatcgggccagcccctcctttgaaggtgcatgttgactgtatgacctcccaaaagcttgtgcgactgccgggattgattgatgtccatgtgcacctgcgggaaccaggtgggacacataaggaggactttgcttcaggcacagccgctgccctggctgggggtatcaccatggtgtgtgccatgcctaatacccggccccccatcattgacgcccctgctctggccctggcccagaagctggcagaggctggcgcccggtgcgactttgcgctattccttggggcctcgtctgaaaatgcaggaaccttgggcaccgtggccgggtctgcagccgggctgaagctttacctcaatgagaccttctctgagctgcggctggacagcgtggtccagtggatggagcatttcgagacatggccctcccacctccccattgtggctcacgcagagcagcaaaccgtggctgctgtcctcatggtggctcagctcactcagcgctcagtgcacatatgtcacgtggcacggaaggaggagatcctgctaattaaagctgcaaaggcacggggcttgccagtgacctgcgaggtggctccccaccacctgttcctaagccatgatgacctggagcgcctggggcctgggaagggggaggtccggcctgagcttggctcccgccaggatgtggaagccctgtgggagaacatggctgtcatcgactgctttgcctcagaccatgctccccataccttggaggagaagtgtgggtccaggcccccacctgggttcccagggttagagaccatgctgccactactcctgacggctgtaagcgagggccggctcagcctggacgacctgctgcagcgattgcaccacaatcctcggcgcatctttcacctgcccccgcaggaggacacctatgtggaggtggatctggagcatgagtggacaattcccagccacatgcccttctccaaggcccactggacaccttttgaagggcagaaagtgaagggcaccgtccgccgtgtggtcctgcgaggggaggttgcctatatcgatgggcaggttctggtacccccgggctatggacaggatgtacggaagtggccacagggggctgttcctcagctcccaccctcagcccctgccactagtgagatgaccacgacacctgaaagaccccgccgtggcatcccagggcttcctgatggccgcttccatctgccgccccgaatccatcgagcctccgacccaggtttgccagctgaggagccaaaggagaagtcctctcggaaggtagccgagccagagctgatgggaacccctgatggcacctgctaccctccaccaccagtaccgagacaggcatctccccagaacctggggacccctggcttgctgcacccccagacctcacccctgctgcactcattagtgggccaacatatcctgtccgtccagcagttcaccaaggatcagatgtctcacctgttcaatgtggcacacacactgcgtatgatggtgcagaaggagcggagcctcgacatcctgaaggggaaggtcatggcctccatgttctatgaagtgagcacacggaccagcagctcctttgcagcagccatggcccggctgggaggtgctgtgctcagcttctcggaagccacatcgtccgtccagaagggcgaatccctggctgactccgtgcagaccatgagctgctatgccgacgtcgtcgtgctccggcacccccagcctggagcagtggagctggccgccaagcactgccggaggccagtgatcaatgctggggatggggtcggagagcaccccacccaggccctgctggacatcttcaccatccgtgaggagctgggaactgtcaatggcatgacgatcacgatggtgggtgacctgaagcacggacgcacagtacattccctggcctgcctgctcacccagtatcgtgtcagcctgcgctacgtggcacctcccagcctgcgcatgccacccactgtgcgggccttcgtggcctcccgcggcaccaagcaggaggaattcgagagcattgaggaggcgctgcctgacactgatgtgctctacatgactcgaatccagaaggaacgatttggctctacccaggagtacgaagcttgctttggtcagttcatcctcactccccacatcatgacccgggccaagaagaagatggtggtgatgcacccgatgccccgtgtcaacgagataagcgtggaagtggactcggatccccgcgcagcctacttccgccaggctgagaacggcatgtacatccgcatggctctgttagccaccgtgctgggccgtttctagggcctggcttcctcagcctcttctctttaggcccagctgctgggcaaggaattccagtgcctcctacgggggcagcacacttagatattcctggacatccagatagctcacatgtgctgaccacacttcaggctctggactggagctctctggcatgggggtggggcctcagatgctggggcccagtctgccccatcttcattcctgcaccttaaacctgtacagtcatttttctactgacttaataaacagccgagctgtcccttga

SEQ ID NO: 70 - DNA, 2689 bp, Homo sapiens
acatctcccggcggcgggccgcggaagcagtgcagacgcggctcctagcggatgggtgctattgtgaggcggttgtagaagagtttcgtgagtgctcgcagctcatacctgtggctgtgtatccgtggccacagctggttggcgtcgccttgaaatcccaggccgtgaggagttagcgagccctgctcacactcggcgctctggttttcggtgggtgtgccctgcacctgcctcttcccccattctcattaataaaggtatccatggagaacactgaaaactcagtggattcaaaatccattaaaaatttggaaccaaagatcatacatggaagcgaatcaatggactctggaatatccctggacaacagttataaaatggattatcctgagatgggtttatgtataataattaataataagaattttcataaaagcactggaatgacatctcggtctggtacagatgtcgatgcagcaaacctcagggaaacattcagaaacttgaaatatgaagtcaggaataaaaatgatcttacacgtgaagaaattgtggaattgatgcgtgatgtttctaaagaagatcacagcaaaaggagcagttttgtttgtgtgcttctgagccatggtgaagaaggaataatttttggaacaaatggacctgttgacctgaaaaaaataacaaactttttcagaggggatcgttgtagaagtctaactggaaaacccaaacttttcattattcaggcctgccgtggtacagaactggactgtggcattgagacagacagtggtgttgatgatgacatggcgtgtcataaaataccagtggaggccgacttcttgtatgcatactccacagcacctggttattattcttggcgaaattcaaaggatggctcctggttcatccagtcgctttgtgccatgctgaaacagtatgccgacaagcttgaatttatgcacattcttacccgggttaaccgaaaggtggcaacagaatttgagtccttttcctttgacgctacttttcatgcaaagaaacagattccatgtattgtttccatgctcacaaaagaactctatttttatcactaaagaaatggttggttggtggttttttttagtttgtatgccaagtgagaagatggtatatttggtactgtatttccctctcattttgacctactctcatgctgcagagggtactttaagacatactccttccatcaaatagaaccactatgaagctacctcaaacttccagtcaggtagttgcaattgaattaaattaggaataaataaaaatggatactggtgcagtcattatgagaggcaatgattgttaatttacagctttcatgattagcaagttacagtgatgctgtgctatgaattttcaagtaattgtgaaaaagttaaacattgaagtaatgaatttttatgatattccccccacttaagactgtgtattctagttttgtcaaactgtagaaatgatgatgtggaagaacttaggcatctgtgggcatggtcaaaggctcaaacctttattttagaattgatatacacggatgacttaactgcatttttagaccatttatctgggattatggttttgtgatgtttgtcctgaacacttttgttgtaaaaaaataataataatgtttaatattgagaaagaaactaatattttatgtgagagaaagtgtgagcaaactaacttgacttttaaggctaaaacttaacattcatagaggggtggagttttaactgtaaggtgctacaatgcccctggatctaccagcataaatatcttctgatttgtccctatgcatatcagttgagcttcatataccagcaatatatctgaagagctattatataaaaaccccaaactgttgattattagccaggtaatgtgaataaattctataggaacatatgaaaatacaacttaaataataaacagtggaatataaggaaagcaataaatgaatgggctgagctgcctgtaacttgagagtagatggtttgagcctgagcagagacatgactcagcctgttccatgaaggcagagccatggaccacgcaggaagggcctacagcccatttctccatacgcactggtatgtgtggatgatgctgccagggcgccatcgccaagtaagaaagtgaagcaaatcagaaacttgtgaagtggaaatgttctaaaggtggtgaggcaataaaaatcatagtactctttgtagcaaaattcttaagtatgttattttctgttgaagtttacaatcaaaggaaaatagtaatgttttatactgtttactgaaagaaaaagacctatgagcacataggactctagacggcatccagccggaggccagagctgagccctcagcccgggaggcaggctccaggcctcagcaggtgcggagccgtcactgcaccaagtctcactggctgtcagtatgacatttcacgggagatttcttgttgctcaaaaaatgagctcgcatttgtcaatgacagtttcttttttcttactagacctgtaacttttgtaaatacacatagcatgtaatggtatcttaaagtgtgtttctatgtgacaattttgtacaaatttgttattttccatttttatttcaaaatatacattcaaacttaaaattaaaaaaaaaaaaaaaaa

SEQ ID NO: 71 - DNA, 11242 bp, Homo sapiens
cccggatagccggcggcggcggcggcggcggcggcggcggcggccgggagaggcccctccttcacgccctgcttctctccctcgctcgcagtcgagccgagccggcggacccgcctgggctccgaccctgcccaggccatggccggcaacgtgaagaagagctctggggccgggggcggcagcggctccgggggctcgggttcgggtggcctgattgggctcatgaaggacgccttccagccgcaccaccaccaccaccaccacctcagcccccacccgccggggacggtggacaagaagatggtggagaagtgctggaagctcatggacaaggtggtgcggttgtgtcagaacccaaagctggcgctaaagaatagcccaccttatatcttagacctgctaccagatacctaccagcatctccgtactatcttgtcaagatatgaggggaagatggagacacttggagaaaatgagtattttagggtgtttatggagaatttgatgaagaaaactaagcaaaccataagcctcttcaaggagggaaaagaaagaatgtatgaggagaattctcagcctaggcgaaacctaaccaaactgtccctcatcttcagccacatgctggcagaactaaaaggaatctttccaagtggactctttcagggagacacatttcggattactaaagcagatgctgcggaattttggagaaaagcttttggggaaaagacaatagtcccttggaagagctttcgacaggctctacatgaagtgcatcccatcagttctgggctggaggccatggctctgaaatccactattgatctgacctgcaatgattatatttcggtttttgaatttgacatctttacccgactctttcagccctggtcctctttgctcaggaattggaacagccttgctgtaactcatcctggctacatggcttttttgacgtatgacgaagtgaaagctcggctccagaaattcattcacaaacctggcagttatatcttccggctgagctgtactcgtctgggtcagtgggctattgggtatgttactgctgatgggaacattctccagacaatccctcacaataaacctctcttccaagcactgattgatggcttcagggaaggcttctatttgtttcctgatggacgaaatcagaatcctgatctgactggcttatgtgaaccaactccccaagaccatatcaaagtgacccaggaacaatatgaattatactgtgagatgggctccacattccaactatgtaaaatatgtgctgaaaatgataaggatgtaaagattgagccctgtggacacctcatgtgcacatcctgtcttacatcctggcaggaatcagaaggtcagggctgtcctttctgccgatgtgaaattaaaggtactgaacccatcgtggtagatccgtttgatcctagagggagtggcagcctgttgaggcaaggagcagagggagctccctccccaaattatgatgatgatgatgatgaacgagctgatgatactctcttcatgatgaaggaattggctggtgccaaggtggaacggccgccttctccattctccatggccccacaagcttcccttcccccggtgccaccacgacttgaccttctgccgcagcgagtatgtgttccctcaagtgcttctgctcttggaactgcttctaaggctgcttctggctcccttcataaagacaaaccattgccagtacctcccacacttcgagatcttccaccaccaccgcctccagaccggccatattctgttggagcagaatcccgacctcaaagacgccccttgccttgtacaccaggcgactgtccctccagagacaaactgccccctgtcccctctagccgccttggagactcatggctgccccggccaatccccaaagtaccagtatctgccccaagttccagtgatccctggacaggaagagaattaaccaaccggcactcacttccattttcattgccctcacaaatggagcccagaccagatgtgcctaggctcggaagcacgttcagtctggatacctccatgagtatgaatagcagcccattagtaggtccagagtgtgaccaccccaaaatcaaaccttcctcatctgccaatgccatttattctctggctgccagacctcttcctgtgccaaaactgccacctggggagcaatgtgagggtgaagaggacacagagtacatgactccctcttccaggcctctacggcctttggatacatcccagagttcacgagcatgtgattgcgaccagcagattgatagctgtacgtatgaagcaatgtataatattcagtcccaggcgccatctatcaccgagagcagcacctttggtgaagggaatttggccgcagcccatgccaacactggtcccgaggagtcagaaaatgaggatgatgggtatgatgtcccaaagccacctgtgccggccgtgctggcccgccgaactctctcagatatctctaatgccagctcctcctttggctggttgtctctggatggtgatcctacaacaaatgtcactgaaggttcccaagttcccgagaggcctccaaaaccattcccgcggagaatcaactctgaacggaaagctggcagctgtcagcaaggtagtggtcctgccgcctctgctgccaccgcctcacctcagctctccagtgagatcgagaacctcatgagtcaggggtactcctaccaggacatccagaaagctttggtcattgcccagaacaacatcgagatggccaaaaacatcctccgggaatttgtttccatttcttctcctgcccatgtagctacctagcacaccatctccctgctgcaggtttagaggaccagtgagttgggagttattactcaagtggcacctagaagggcaggagttcctttggtgacttcacagtgaagtcttgccctctctgtgggatatcacatcagtggttccaagatttcaaagtggtgaaatgaaaatggagcagctagtatgttttattattttatgggtcttgagtgcatttgaaggtgtccttcagttcccacgtagagagagtgtggattatattacatgataacctacctggggaacagtccagaaagctatagaacaagtattttgctggaaatcctaattgaggacttaagacttcctgggttaaggatgtggccgtgtgtgtgtgtgtctgcctgtggttgtatgtgtccttgtgattataagattaacctgctgtgtgtgttaattccaggcagggaattagcacaaaaggtttaggaaggaatctttttttaaagacttccatctactgtggtattatacccaagcctagtgtgtattacaacttcaacactcccctttggcttatattaccatgtgcatagctaaagtcttctatttttagaacaccttctgtctgttctttccccatcaactccttcctcatccttcttggtgttctgtcatgggccatgggcttgctatggccagccttactgaggccaagcagcttatgggatgttctttattgtgtgtgatggtattggtttgtttggtagataagtgggaggaaaagtactgttgctacactattataggcatgtttgatactagcagctaacactggtcactccaaagcactgtttctataggaacattgaagctattaagatgttttgattatcctaattacataatgaccgatttgagatagaggcctttaaatacattccatgccctccccagaaaatagtctgtgggagtcagttgccttggtgccaggtatgtgttctgatgtaggtcatgagtctttctacttaatgggaagggaagaacatttgtttccaggatgactttctggccagaataccggaaagcttttaggaagcttcgttcacatgctatttaaatgcacaaaatagacagtaaggatttatctgttcagtttttcttcccagtgaattaatttcagcttatatgggtgtcttcatttgaacatgaggaatattaggttatattttcagcagtggttttttcctttgccctttaaggagtggggataatgtccacggtggcccagcctcttgctgatggcaccttccctgcattgctgcctcccgatgatgtggttcttttcttgtgcctgtggctttgggaatgtaacatctctttcctcctttccttcccttttcctcttcacctgaggtcctaaatactctctgtaattactgtgttcttcacggtaattagacatcattcagtgaataaattactgtagtcaaagacagtatgggctggcagtttgtgtaattgcaagttcataaagagaattgagggtccagttgggagaactattagtcagttcttttatatgctgataaatgatccctcgagttcagttagtattctgtccagagtgtttagctcactttcttagcagtgtgtaagctttctccatgtcagaagcaagcctgctctttgataaatctgtcttcctgaaaatctaaatcatgcttttgtctttagatctacacagaaatgaccctccttggatcagttttctttccagtctaatcatctttggaactaaaacttgttctaactcgtctcttggcattcagctactcctagatcttttggttttatcccctggcctcagagccatttatattcccagagtaggcagtacaggatctcgtgttgatttgctgtggttacccagtgtcttctctacatggcataaagcggcaaagcccaccattaggtgaggcggtcccgagttgaggtagagtggggcagaggaagatggcagtgaatatcaaacagtagaccgccatcaacttctaacagccagtacacacactgtttcattttgaggtaacgttcagttttgcattttgtttaaatattgaaggcctagacaaagaactagaaaaaaaaaagcagtttccaggcccatccatattgtaatttttctttatctgcagatattgcctgtagtctaaagatctctttggaagacaaagcattggctatatatcttttgccttttccatgcatctaaatcttctctggagattatctccctactgtgtaggttaagggcagtctcgacttttccttttttgagtcctgtgtggctctttgaatcagcgtgaaactgaggctccagctccctgtgttgtgtgtgtgtgccatccatgggcttgggtgtcagtttgtcacaggtatctgccagcattcaaggttttggatcatttcatgaggatctttcctttgactgggtgctgtgaggacacacctgggtctgtgcctgagattgccaggcaagattaaggaaagttttcatgtggcttttgttttgaggttattctcaaaaccttaatttcttatattttctgttgactaaggcaccagtaacccattcttcaccctccatttgtatggcaatttaaaagtctttggctttgctctgaatttaattaaaactgccttttatgaacagacttcgagttttgccattttgggcaagcccttccgcttgtcccttcctagtggctaataaagtaaaaaaacccacactactttgttctctttttctcatattcattgggctgttgtattcagccagtctcatgctttccctgggtcttcacggattgctttccaagctgccttgttgcggggttgctgcagagcagcaactggacctttccagctgtcgccatgttccttccactaaagtagagggttcttaaaatggaaaaacctgtgggctcttcatatacctccctttagttaagtaatagaccaggcagcttctcatctcagcatttacctgttaatatttttgtgaatagtgctctctacctgtgggtggccgttctcttccacttgctcgtctccccccagccccattctgcataatctaccattcttctcctctctttctcttcttatacagaccctcattactggggcccaagatgtgggatactactgttagtattatttaactattttgtagatttaaaagatttctggttaagggaggtgggggtcactgttcatcactcttaaaatatgtgttttctctatagaaaagtaaaatgtgtttatggtcccaaacagtcaactcacaaatttttataacaaaatttccttgtaaaaactagggaccatctatatattccctttaagatctagttctttttgtaggtgttcagcaatggtgataaagcagaatattctcctacctcacgtcattaaagtcagaagattatagaccttctcaaactataagtccctcttcttgccgttggcctttctgactctggaatgaccactgttcattgaaaaatagttttctgactattggtctggctctaacagtttgtttgttcatccagcaaatgtttatgagtgatgaccatgtgccagaaatgtcaggtatgtgtccttcccttggcgccacatagtagtttactaatgtttgggggattgtacttggactgtcatagcctctgcgtttgaccttaaaatagctcttcccagtaagattgtgcaatttttattcacagctcttccatgtagacttacctttcctcatagagctatcctggttaataacaggccaagattctcccattatcccctgttgtctcctgtagctttgataatgcctgggagattccttggtgtaagtgtcatggataccgactgtttttatgttggaatttgttccaacataattagaatctgtttggtgagttgaaaggtaagttggctcagagttgcacagtagggcattaaatgtttaagcaaagcatctgcccacactcccctttccaatctagtgccttccttgaactttttcctgagctgctacgtccctaatcccccttgttgggaggattttcgtatcacccttatgggacctgtcaccatgtcctgtactatttggaattggttttccagtctttcaacaaccgttgtggctaactatgttttagaagggctggaggtgtgggccctgtcttcgggtctcaggacccaaagatcctttagtcagttgttgggtcttccaagagccagacattaatacagattgaactccatcagtcccctaattgtcagcctttacctccctcccagagcaaggagtttagggattctaaagcttagtgtccacacatcattctaccagaccttagagctttagaagctcaatctaaaatactgtaactcagcataaactattactatcactcctttgaactcagtctccatgagcagtgttttgttggaaatacatagaacggcttaatgcctagagggtggtggatagtgaaggacggtcaaggttatatttttgactgcttagggattctttggatccaagaaacagaaatgttcaagcggaataaaggagggagtggagttgtggtaaggatgcagggtatttcgcagaacccaggacgggaagtgcctttggttcttgggtggagctggaactgcagagctttgcacctagtcctttctcccgcttcacagtctgcttatggtatatgtggcccccaaataggcactctagtcctcaagtctacaccaccttccaactctggggatcaccatgaacaaattctcaatttcccatacttaattttttttttttttgagatggagtctcgctgtgtcgcccaggctggagtgcagtggtgcagtctcaactcaccacaacctctgcctcccaggttcaagcagttctctgcctcaacctcccgagtagctgggattacaggcgcctgccaccatgcccagctaatgttcatatttttagtagagacagggtttcaccgtcttggctaggctggtcttgaactcctgaccctcatgatccacccacctcggcctcccaaagtgctaagattacaggcgtgagccaccgcgcccggcccatacttcgtattcttaaaaaaaactacactcagcccagcacattgatcaagtatctatctctgagcagttggccttgccagggagagcagagatgtggcaggctccttcagctggagacagggagcttctcagagaagtgagcagagactccacagacaccctaaaaaggcttctactcaagaagtaaagccactactcctgcctttttgcttagtggacaggaaggcacaggagtttgtctgggacatcatagaaattcttaggtttaacttaattctggtcattgtcttctttatttcctgtttttcttccctttgtcagtcttcgcatccaagatttcttccctccctcttgtgggccagcctgtcctgttccagagctagcctgttcctgggtagccttccttagcctccattcagcctcaggtcttttgccttcttccgtgtttatttagagagcagaatctaataacgggttccactgtagccactatccatggacttctgggtcctcttcaggtttgagtgcttgaaaatgttcattctctgggcttgtggcctgtctcctccactctcctcctcaccctctcgctccttcctgtgtgagggccgctctgcagtaatgttctcaggcaagccttcctaggcacctcagaaactactttgccagagccagtaagaatatataatattggagcagttgccaggatagaaattaaatatagattccagtttaggatagagtttttaccgagagctctttagacagtatacctgtgtcttctctggcaattgctttcattttagtcctatataaaagctttccttttctgtttttttttaaaactatgcttttgcttgcctaaatcttttgatcttatatttctctcatctcagagcctgtcctgagttgtaaggtatttcatactgccttacttaaaagttttttaaactactagagtcatttgatacacacagaagttacctaataatccaaagatgtccatcaagggaggaagggtgggtcatcagactttgcctttgatgttgtagactaggctcctgagttaagcagcagagggacagcagtgccatgtgccttcactgtgtcccaggaaatctgggttggttccagtgggaaataccagtatttcttggttctggaaagtagcaaaagagtaggagatggggaaatagggatggggagagcaagccccgcatgtccatggcgagtcaggtggggagcacgggtggaagggccggctgttgacagacagactaagctgtgtggtgctcttgccgccccttcctgggtacagagcttgagaaaaatgcagccgaccactccctgtgtttgtacagagcaaagcccaaaagccaacctcagatctcctgatttggcagctgaagaaatcagcagagtcctgattgcctgattcagtcccaaaaatgaatgtcaggccccgccccctccccaccaacattgcctctcctacattctccttctgcccctaaatcagacaggaggccagagaggagtattgctcaatgcgtgctatgtgcaactcctcaggccttgtgccacctccatgctgagccctgaagcagggtgtcctgggtgcctgtgtgtcagctccctcctctctacctacctctgaccttcttgtgggtgagggtggccatgcttatggccatcttaaaactggagaggcagagaactacttatgagtctgtagaccacgtgttgtcttccatggcctgtttctcctgctgtctgggtgagtgagcctgcaacgcaatgcccatgagagtaaatgcctcctgacctaccctgctcagcactgttctagtgtcttggccttgaaagaaaagcctgacttcctgctgacacatgtggtaggggcatggcagctatgaggcacctcctacgtctgttttctggctgtggtgacttgggatttttaaccttatatatctttttcctttactcaaaacaaaacaatttttagcacactgaaaaaaaaaaaaagccaaatgttttgtgcctttctaaggcagcactgtatcccaggctgcattttaggacttaatatggaaataccagagtctgagctcctctaccttgagtttcattagtccttagtgtctaggagacaggaaagaatgctctctgtgactggagaggtgacatgcaggtgcagtgtgtctggagtccctttcccctgctgtgagacttcagtggaggagagaagcattgtaccctgggatcatttggttggttccaatcacaagcttagttatcaggttgcatgccttgtctcctgcaaaagacagaatgtttcacaattcccaggtaaactctggaccattccaagtgtcctagccttctgatgacattaattacctagttgtgtcgaggagtataggatggactctcctgagaaggggaggttggtggctttgtcttttctttttgctggatcctgaactggtctagacctcctgcccccaccccccagcccccatcagatgtggctggcctttcatttgaaggcttcagacttaaagcattaagcagctagtgccctctgcagggcctggtttccccagggaagggcagcaaggaacatgggaccagaagcctgtcctcagtaatgtgactatagtgagctttagcaaaagtttttctatataatgacatcttacttatcttttaccctttcctcagttttcccctgcctttaactaataaagaattgggagacagaaattttaaagtcctccttattcaagattttgaaattcttagcctgggagtgctggagagaacctgatgctttctccagaatgaagagtcccaatttgtatatcagtgttaagaagaaaacaaaacaaacacataggtgagattttcgtggactattttaaaaatgtgtcattaatataaaaaatttatattagcagtatttaatcattctcacctgtaaagaataagaaaaacagaaggtaaatattcttacagagaatagcagagctttaagattcattttcattttaagtccattttattttgccagtgtattaatgtttagaagtctgttttactaatgttatttattaattttttttcatttccatacacagttagttaactaaagagctttttcaagcacccatgtctgtaaaaaaatatttttaaataaagtttcttttgttgtagcagaaaaaaaaaaaaaaaa

SEQ ID NO: 72 - DNA, 1682 bp, Homo sapiens
cggcagccagcctattctttggccgggtcggtgcgagtggtcggctgggcagagtgcacgctgcttggcgccgcaggctgatcccgccgtccactcccgggagcagtgatgttgggcaactctgcgccggggcctgcgacccgcgaggcgggctcggcgctgctagcattgcagcagacggcgctccaagaggaccaggagaatatcaacccggaaaaggcagcgcccgtccaacaaccgcggacccgggccgcgctggcggtactgaagtccgggaacccgcggggtctagcgcagcagcagaggccgaagacgagacgggttgcaccccttaaggatcttcctgtaaatgatgagcatgtcaccgttcctccttggaaagcaaacagtaaacagcctgcgttcaccattcatgtggatgaagcagaaaaagaagctcagaagaagccagctgaatctcaaaaaatagagcgtgaagatgccctggcttttaattcagccattagtttacctggacccagaaaaccattggtccctcttgattatccaatggatggtagttttgagtcaccacatactatggacatgtcaattgtattagaagatgaaaagccagtgagtgttaatgaagtaccagactaccatgaggatattcacacataccttagggaaatggaggttaaatgtaaacctaaagtgggttacatgaagaaacagccagacatcactaacagtatgagagctatcctcgtggactggttagttgaagtaggagaagaatataaactacagaatgagaccctgcatttggctgtgaactacattgataggttcctgtcttccatgtcagtgctgagaggaaaacttcagcttgtgggcactgctgctatgctgttagcctcaaagtttgaagaaatataccccccagaagtagcagagtttgtgtacattacagatgatacctacaccaagaaacaagttctgagaatggagcatctagttttgaaagtccttacttttgacttagctgctccaacagtaaatcagtttcttacccaatactttctgcatcagcagcctgcaaactgcaaagttgaaagtttagcaatgtttttgggagaattaagtttgatagatgctgacccatacctcaagtatttgccatcagttattgctggagctgcctttcatttagcactctacacagtcacgggacaaagctggcctgaatcattaatacgaaagactggatataccctggaaagtcttaagccttgtctcatggaccttcaccagacctacctcaaagcaccacagcatgcacaacagtcaataagagaaaagtacaaaaattcaaagtatcatggtgtttctctcctcaacccaccagagacactaaatctgtaacaatgaaagactgcctttgttttctaagatgtaaatcactcaaagtatatggtgtacagtttttaacttaggttttaattttacaatcatttctgaatacagaagttgtggccaagtacaaattatggtatctattactttttaaatggttttaatttgtatatcttttgtatatgtatctgtcttagatatttggctaattttaagtggttttgttaaagtattaatgatgccagctgtcaggataataaattgatttggaaaacttaaaaaaa

SEQ ID NO: 73 - DNA, 2101 bp, Homo sapiens
acgaacaggccaataaggagggagcagtgcggggtttaaatctgaggctaggctggctcttctcggcgtgctgcggcggaacggctgttggtttctgctgggtgtaggtccttggctggtcgggcctccggtgttctgcttctccccgctgagctgctgcctggtgaagaggaagccatggcgctccgagtcaccaggaactcgaaaattaatgctgaaaataaggcgaagatcaacatggcaggcgcaaagcgcgttcctacggcccctgctgcaacctccaagcccggactgaggccaagaacagctcttggggacattggtaacaaagtcagtgaacaactgcaggccaaaatgcctatgaagaaggaagcaaaaccttcagctactggaaaagtcattgataaaaaactaccaaaacctcttgaaaaggtacctatgctggtgccagtgccagtgtctgagccagtgccagagccagaacctgagccagaacctgagcctgttaaagaagaaaaactttcgcctgagcctattttggttgatactgcctctccaagcccaatggaaacatctggatgtgcccctgcagaagaagacctgtgtcaggctttctctgatgtaattcttgcagtaaatgatgtggatgcagaagatggagctgatccaaacctttgtagtgaatatgtgaaagatatttatgcttatctgagacaacttgaggaagagcaagcagtcagaccaaaatacctactgggtcgggaagtcactggaaacatgagagccatcctaattgactggctagtacaggttcaaatgaaattcaggttgttgcaggagaccatgtacatgactgtctccattattgatcggttcatgcagaataattgtgtgcccaagaagatgctgcagctggttggtgtcactgccatgtttattgcaagcaaatatgaagaaatgtaccctccagaaattggtgactttgcttttgtgactgacaacacttatactaagcaccaaatcagacagatggaaatgaagattctaagagctttaaactttggtctgggtcggcctctacctttgcacttccttcggagagcatctaagattggagaggttgatgtcgagcaacatactttggccaaatacctgatggaactaactatgttggactatgacatggtgcactttcctccttctcaaattgcagcaggagctttttgcttagcactgaaaattctggataatggtgaatggacaccaactctacaacattacctgtcatatactgaagaatctcttcttccagttatgcagcacctggctaagaatgtagtcatggtaaatcaaggacttacaaagcacatgactgtcaagaacaagtatgccacatcgaagcatgctaagatcagcactctaccacagctgaattctgcactagttcaagatttagccaaggctgtggcaaaggtgtaacttgtaaacttgagttggagtactatatttacaaataaaattggcaccatgtgccatctgtacatattactgttgcatttacttttaataaagcttgtggccccttttacttttttatagcttaactaatttgaatgtggttacttcctactgtagggtagcggaaaagttgtcttaaaaggtatggtggggatatttttaaaaactccttttggtttacctggggatccaattgatgtatatgtttatatactgggttcttgttttatatacctggcttttactttattaatatgagttactgaaggtgatggaggtatttgaaaattttacttccataggacatactgcatgtaagccaagtcatggagaatctgctgcatagctctattttaaagtaaaagtctaccaccgaatccctagtccccctgttttctgtttcttcttgtgattgctgccataattctaagttatttacttttaccactatttaagttatcaactttagctagtatcttcaaactttcactttgaaaaatgagaattttatattctaagccagttttcattttggttttgtgttttggttaataaaacaatactcaaatacaaaaaaaaaaaa

SEQ ID NO: 74 - DNA, 1530 bp, Homo sapiens
aatcctggaacaaggctacagcgtcgaagatccccagcgctgcgggctcggagagcagtcctaacggcgcctcgtacgctagtgtcctcccttttcagtccgcgtccctccctgggccgggctggcactcttgccttccccgtccctcatggcgctgctccgacgcccgacggtgtccagtgatttggagaatattgacacaggagttaattctaaagttaagagtcatgtgactattaggcgaactgttttagaagaaattggaaatagagttacaaccagagcagcacaagtagctaagaaagctcagaacaccaaagttccagttcaacccaccaaaacaacaaatgtcaacaaacaactgaaacctactgcttctgtcaaaccagtacagatggaaaagttggctccaaagggtccttctcccacacctgaggatgtctccatgaaggaagagaatctctgccaagctttttctgatgccttgctctgcaaaatcgaggacattgataacgaagattgggagaaccctcagctctgcagtgactacgttaaggatatctatcagtatctcaggcagctggaggttttgcagtccataaacccacatttcttagatggaagagatataaatggacgcatgcgtgccatcctagtggattggctggtacaagtccactccaagtttaggcttctgcaggagactctgtacatgtgcgttggcattatggatcgatttttacaggttcagccagtttcccggaagaagcttcaattagttgggattactgctctgctcttggcttccaagtatgaggagatgttttctccaaatattgaagactttgtttacatcacagacaatgcttataccagttcccaaatccgagaaatggaaactctaattttgaaagaattgaaatttgagttgggtcgacccttgccactacacttcttaaggcgagcatcaaaagccggggaggttgatgttgaacagcacactttagccaagtatttgatggagctgactctcatcgactatgatatggtgcattatcatccttctaaggtagcagcagctgcttcctgcttgtctcagaaggttctaggacaaggaaaatggaacttaaagcagcagtattacacaggatacacagagaatgaagtattggaagtcatgcagcacatggccaagaatgtggtgaaagtaaatgaaaacttaactaaattcatcgccatcaagaataagtatgcaagcagcaaactcctgaagatcagcatgatccctcagctgaactcaaaagccgtcaaagaccttgcctccccactgataggaaggtcctaggctgccgtgggccctggggatgtgtgcttcattgtgccctttttcttattggtttagaactcttgattttgtacatagtcctctggtctatctcatgaaacctcttctcagaccagttttctaaacatatattgaggaaaaataaagcgattggtttttcttaaggtaaaaaaaaaaaaaaaaaa

SEQ ID NO: 75 - DNA, 2748 bp, Homo sapiens
agcgggtgcggggcgggaccggcccggcctatatattgggttggcgccggcgccagctgagccgagcggtagctggtctggcgaggttttatacacctgaaagaagagaatgtcaagacgaagtagccgtttacaagctaagcagcagccccagcccagccagacggaatccccccaagaagcccagataatccaggccaagaagaggaaaactacccaggatgtcaaaaaaagaagagaggaggtcaccaagaaacatcagtatgaaattaggaattgttggccacctgtattatctggggggatcagtccttgcattatcattgaaacacctcacaaagaaataggaacaagtgatttctccagatttacaaattacagatttaaaaatctttttattaatccttcacctttgcctgatttaagctggggatgttcaaaagaagtctggctaaacatgttaaaaaaggagagcagatatgttcatgacaaacattttgaagttctgcattctgacttggaaccacagatgaggtccatacttctagactggcttttagaggtatgtgaagtatacacacttcatagggaaacattttatcttgcacaagacttttttgatagatttatgttgacacaaaaggatataaataaaaatatgcttcaactcattggaattacctcattattcattgcttccaaacttgaggaaatctatgctcctaaactccaagagtttgcttacgtcactgatggtgcttgcagtgaagaggatatcttaaggatggaactcattatattaaaggctttaaaatgggaactttgtcctgtaacaatcatctcctggctaaatctctttctccaagttgatgctcttaaagatgctcctaaagttcttctacctcagtattctcaggaaacattcattcaaatagctcagcttttagatctgtgtattctagccattgattcattagagttccagtacagaatactgactgctgctgccttgtgccattttacctccattgaagtggttaagaaagcctcaggtttggagtgggacagtatttcagaatgtgtagattggatggtaccttttgtcaatgtagtaaaaagtactagtccagtgaagctgaagacttttaagaagattcctatggaagacagacataatatccagacacatacaaactatttggctatgctggaggaagtaaattacataaacaccttcagaaaagggggacagttgtcaccagtgtgcaatggaggcattatgacaccaccgaagagcactgaaaaaccaccaggaaaacactaaagaagataactaagcaaacaagttggaattcaccaagattgggtagaactggtatcactgaactactaaagttttacagaaagtagtgctgtgattgattgccctagccaattcacaagttacactgccattctgattttaaaacttacaattggcactaaagaatacatttaattatttcctatgttagctgttaaagaaacagcaggacttgtttacaaagatgtcttcattcccaaggttactggatagaagccaaccacagtctataccatagcaatgtttttcctttaatccagtgttactgtgtttatcttgataaactaggaattttgtcactggagttttggactggataagtgctaccttaaagggtatactaagtgatacagtactttgaatctagttgttagattctcaaaattcctacactcttgactagtgcaatttggttcttgaaaattaaatttaaacttgtttacaaaggtttagttttgtaataaggtgactaatttatctatagctgctatagcaagctattataaaacttgaatttctacaaatggtgaaatttaatgttttttaaactagtttatttgccttgccataacacattttttaactaataaggcttagatgaacatggtgttcaacctgtgctctaaacagtgggagtaccaaagaaattataaacaagataaatgctgtggctccttcctaactggggctttcttgacatgtaggttgcttggtaataacctttttgtatatcacaatttgggtgaaaaacttaagtaccctttcaaactatttatatgaggaagtcactttactactctaagatatccctaaggaatttttttttttaatttagtgtgactaaggctttatttatgtttgtgaaactgttaaggtcctttctaaattcctccattgtgagataaggacagtgtcaaagtgataaagcttaacacttgacctaaacttctattttcttaaggaagaagagtattaaatatatactgactcctagaaatctatttattaaaaaaagacatgaaaacttgctgtacataggctagctatttctaaatattttaaattagcttttctaaaaaaaaaatccagcctcataaagtagattagaaaactagattgctagtttattttgttatcagatatgtgaatctcttctccctttgaagaaactatacatttattgttacggtatgaagtcttctgtatagtttgtttttaaactaatatttgtttcagtattttgtctgaaaagaaaacaccactaattgtgtacatatgtattatataaacttaaccttttaatactgtttatttttagcccattgtttaaaaaataaaagttaaaaaaatttaactgcttaaaagtaaaaaaaaaaaaaaaaaaa

SEQ ID NO: 76 - DNA, 1686 bp, Homo sapiens
ccacgcgtccgggcgtaagccaggcgtgttaaagccggtcggaactgctccggagggcacgggctccgtaggcaccaactgcaaggacccctccccctgcgggcgctcccatggcacagttcgcgttcgagagtgacctgcactcgctgcttcagctggatgcacccatccccaatgcaccccctgcgcgctggcagcgcaaagccaaggaagccgcaggcccggccccctcacccatgcgggccgccaaccgatcccacagcgccggcaggactccgggccgaactcctggcaaatccagttccaaggttcagaccactcctagcaaacctggcggtgaccgctatatcccccatcgcagtgctgcccagatggaggtggccagcttcctcctgagcaaggagaaccagtctgaaaacagccagacgcccaccaagaaggaacatcagaaagcctgggctttgaacctgaacggttttgatgtagaggaagccaagatccttcggctcagtggaaaaccacaaaatgcgccagagggttatcagaacagactgaaagtactctacagccaaaaggccactcctggctccagccggaagacctgccgttacattccttccctgccagaccgtatcctggatgcgcctgaaatccgaaatgactattacctgaaccttgtggattggagttctgggaatgtactggccgtggcactggacaacagtgtgtacctgtggagtgcaagctctggtgacatcctgcagcttttgcaaatggagcagcctggggaatatatatcctctgtggcctggatcaaagagggcaactacttggctgtgggcaccagcagtgctgaggtgcagctatgggatgtgcagcagcagaaacggcttcgaaatatgaccagtcactctgcccgagtgggctccctaagctggaacagctatatcctgtccagtggttcacgttctggccacatccaccaccatgatgttcgggtagcagaacaccatgtggccacactgagtggccacagccaggaagtgtgtgggctgcgctgggccccagatggacgacatttggccagtggtggtaatgataacttggtcaatgtgtggcctagtgctcctggagagggtggctgggttcctctgcagacattcacccagcatcaaggggctgtcaaggccgtagcatggtgtccctggcagtccaatgtcctggcaacaggagggggcaccagtgatcgacacattcgcatctggaatgtgtgctctggggcctgtctgagtgccgtggatgcccattcccaggtgtgctccatcctctggtctccccattacaaggagctcatctcaggccatggctttgcacagaaccagctagttatttggaagtacccaaccatggccaaggtggctgaactcaaaggtcacacatcccgggtcctgagtctgaccatgagcccagatggggccacagtggcatccgcagcagcagatgagaccctgaggctatggcgctgttttgagttggaccctgcgcggcggcgggagcgggagaaggccagtgcagccaaaagcagcctcatccaccaaggcatccgctgaagaccaacccatcacctcagttgttttttatttttctaataaagtcatgtctcccttcatgtttttttttttaaaa

SEQ ID NO: 77 - DNA, 3701 bp, Homo sapiens
gcagccagtcgcggaggcggggaggctgcgcggtcagaggcgcctggagcgagcgaatcctggcccaccgcctgcccaaccgcgtgaccttgattgagttaatgaacttcacgcctcagcgtccaggtctgtaaaatggggtgtctaacgcagaccgtacagcccagctgggtttagcaaacttccgggagccagttggagcctctccccatccctagcggtgatcccaggtgacgacatgccgcggggggtcctgcggaggccaccctagggcgttgctgctgcctttgggagtgtggagctccaaaccatgtcgcgagaggcggattttgggaggccgggatcctcgcgccagggggatgtgcgagggtgtgggataaatcttaattcctccggcccacccaaagcctggaaatccagcctccgcgcctcttgccctgcgggccccgccctcagtcccgccctcatctaacccgctaccccattggtggcgtccggcggcgcggctgctgttatttttcgaatatataaggaggtggaagtggcagctgcaactagaggcttccctggctggtgcctgagcccggcgtccctcgccccccgccctccccgcatccctctcctccctcgcgcctggccctgtggctcttcctccctccctccttccccccccccccacccctcgcccgctgcctccctcggcccagccagctgtgccggcgtttgttggctgccctgcgcccggccctccagccagccttctgccggccccgccgcgatggaggtgccccagccggagcccgcgccaggctcggctctcagtccagcaggcgtgtgcggtggcgcccagcgtccgggccacctcccgggcctcctgctgggatctcatggcctcctggggtccccggtgcgggcggccgcttcctcgccggtcaccaccctcacccagaccatgcacgacctcgccgggctcggcagcgaaaccccaaagagtcaggtagggaccctgctcttccgcagccgcagccgcctgacgcacctatccctgtctcgacgggcatccgaatcctccctgtcgtctgaatcctccgaatcttctgatgcaggtctctgcatggattcccccagccctatggacccccacatggcggagcagacgtttgaacaggccatccaggcagccagccggatcattcgaaacgagcagtttgccatcagacgcttccagtctatgccggtgaggctgctgggccacagccccgtgcttcggaacatcaccaactcccaggcgcccgacggccggaggaagagcgaggcgggcagtggagctgccagcagctctggggaagacaaggagaatgatggatttgtcttcaagatgccatggaagcccacacatcccagctccacccatgctctggcagagtgggccagccgcagggaagcctttgcccagagacccagctcggcccccgacctgatgtgtctcagtcctgaccggaagatggaagtggaggagctcagccccctggccctaggtcgcttctctctgacccctgcagagggggatactgaggaagatgatggatttgtggacatcctagagagtgacttaaaggatgatgatgcagttcccccaggcatggagagtctcattagtgccccactggtcaagaccttggaaaaggaagaggaaaaggacctcgtcatgtacagcaagtgccagcggctcttccgctctccgtccatgccctgcagcgtgatccggcccatcctcaagaggctggagcggccccaggacagggacacgcccgtgcagaataagcggaggcggagcgtgacccctcctgaggagcagcaggaggctgaggaacctaaagcccgcgtcctccgctcaaaatcactgtgtcacgatgagatcgagaacctcctggacagtgaccaccgagagctgattggagattactctaaggccttcctcctacagacagtagacggaaagcaccaagacctcaagtacatctcaccagaaacgatggtggccctattgacgggcaagttcagcaacatcgtggataagtttgtgattgtagactgcagatacccctatgaatatgaaggcgggcacatcaagactgcggtgaacttgcccctggaacgcgacgccgagagcttcctactgaagagccccatcgcgccctgtagcctggacaagagagtcatcctcattttccactgtgaattctcatctgagcgtgggccccgcatgtgccgtttcatcagggaacgagaccgtgctgtcaacgactaccccagcctctactaccctgagatgtatatcctgaaaggcggctacaaggagttcttccctcagcacccgaacttctgtgaaccccaggactaccggcccatgaaccacgaggccttcaaggatgagctaaagaccttccgcctcaagactcgcagctgggctggggagcggagccggcgggagctctgtagccggctgcaggaccagtgaggggcctgcgccagtcctgctacctcccttgcctttcgaggcctgaagccagctgccctatgggcctgccgggctgagggcctgctggaggcctcaggtgctgtccatgggaaagatggtgtgggtgtcctgcctgtctgccccagcccagattcccctgtgtcatcccatcattttccatatcctggtgccccccacccctggaagagcccagtctgttgagttagttaagttgggttaataccagcttaaaggcagtattttgtgtcctccaggagcttcttgtttccttgttagggttaacccttcatcttcctgtgtcctgaaacgctcctttgtgtgtgtgtcagctgaggctgggggagagccgtggtccctgaggatgggtcagagctaaactccttcctggcctgagagtcagctctctgccctgtgtacttcccgggccagggctgcccctaatctctgtaggaaccgtggtatgtctgccatgttgcccctttctcttttcccctttcctgtcccaccatacgagcacctccagcctgaacagaagctcttactctttcctatttcagtgttacctgtgtgcttggtctgtttgactttacgcccatctcaggacacttccgtagactgtttaggttcccctgtcaaatatcagttacccactcggtcccagttttgttgccccagaaagggatgttattatccttgggggctcccagggcaagggttaaggcctgaatcatgagcctgctggaagcccagcccctactgctgtgaaccctggggcctgactgctcagaacttgctgctgtcttgttgcggatggatggaaggttggatggatgggtggatggccgtggatggccgtggatgcgcagtgccttgcatacccaaaccaggtgggagcgttttgttgagcatgacagcctgcagcaggaatatatgtgtgcctatttgtgtggacaaaaatatttacacttagggtttggagctattcaagaggaaatgtcacagaagcagctaaaccaaggactgagcaccctctggattctgaatctcaagatgggggcagggctgtgcttgaaggccctgctgagtcatctgttagggccttggttcaataaagcactgagcaagttgagaaaaaaaaaaaaaaaaaaaaaaaaaaaaa

SEQ ID NO: 78 - DNA, 2115 bp, Homo sapiens
ggtcaacgcctgcggctgttgatattcttgctcagaggccgtaactttggccttctgctcagggaagactctgagtccgacgttggcctacccagtcggaaggcagagctgcaatctagttaactacctcctttcccctagatttcctttcattctgctcaagtcttcgcctgtgtccgatccctatctactttctctcctcttgtaggcaagcctcagactccaggcttgagctaggttttgtttttctcctggtgagaattcgaagaccatgtctacggaactcttctcatccacaagagaggaaggaagctctggctcaggacccagttttaggtctaatcaaaggaaaatgttaaacctgctcctggagagagacacttcctttaccgtctgtccagatgtccctagaactccagtgggcaaatttcttggtgattctgcaaacctaagcattttgtctggaggaaccccaaaacgttgcctcgatctttcgaatcttagcagtggggagataactgccactcagcttaccacttctgcagaccttgatgaaactggtcacctggattcttcaggacttcaggaagtgcatttagctgggatgaatcatgaccagcacctaatgaaatgtagcccagcacagcttctttgtagcactccgaatggtttggaccgtggccatagaaagagagatgcaatgtgtagttcatctgcaaataaagaaaatgacaatggaaacttggtggacagtgaaatgaaatatttgggcagtcccattactactgttccaaaattggataaaaatccaaacctaggagaagaccaggcagaagagatttcagatgaattaatggagttttccctgaaagatcaagaagcaaaggtgagcagaagtggcctatatcgctccccgtcgatgccagagaacttgaacaggccaagactgaagcaggtggaaaaattcaaggacaacacaataccagataaagttaaaaaaaagtatttttctggccaaggaaagctcaggaagggcttatgtttaaagaagacagtctctctgtgtgacattactatcactcagatgctggaggaagattctaaccaggggcacctgattggtgatttttccaaggtatgtgcgctgccaaccgtgtcagggaaacaccaagatctgaagtatgtcaacccagaaacagtggctgccttactgtcggggaagttccagggtctgattgagaagttttatgtcattgattgtcgctatccatatgagtatctgggaggacacatccagggagccttaaacttatatagtcaggaagaactgtttaacttctttctgaagaagcccatcgtccctttggacacccagaagagaataatcatcgtgttccactgtgaattctcctcagagaggggcccccgaatgtgccgctgtctgcgtgaagaggacaggtctctgaaccagtatcctgcattgtactacccagagctatatatccttaaaggcggctacagagacttctttccagaatatatggaactgtgtgaaccacagagctactgccctatgcatcatcaggaccacaagactgagttgctgaggtgtcgaagccagagcaaagtgcaggaaggggagcggcagctgcgggagcagattgcccttctggtgaaggacatgagcccatgataacattccagccactggctgctaacaagtcaccaaaagacactgcagaaaccctgagcagaaagaggccttctggatggccaaacccaagattattaaaagatgtctctgcaaaccaacaggctaccaacttgtatccaggcctgggaatggattaggtttcagcagagctgaaagctggtggcagagtcctggagctggctctataaggcagccttgagttgcatagagatttgtattggttcagggaactctggcattccttttcccaactcctcatgtcttctcacaagccagccaactctttctctctgggcttcgggctatgcaagagcgttgtctaccttctttctttgtattttccttctttgtttccccctctttcttttttaaaaatggaaaaataaacactacagaatgag

SEQ ID NO: 79 - DNA, 1938 bp, Homo sapiens
gatttggcgggagtcttgaccgccgccgggctcttggtacctcagcgcgagcgccaggcgtccggccgccgtggctatgttcgtgtccgatttccgcaaagagttctacgaggtggtccagagccagagggtccttctcttcgtggcctcggacgtggatgctctgtgtgcgtgcaagatccttcaggccttgttccagtgtgaccacgtgcaatatacgctggttccagtttctgggtggcaagaacttgaaactgcatttcttgagcataaagaacagtttcattattttattctcataaactgtggagctaatgtagacctattggatattcttcaacctgatgaagacactatattctttgtgtgtgacacccataggccagtcaatgtcgtcaatgtatacaacgatacccagatcaaattactcattaaacaagatgatgaccttgaagttcccgcctatgaagacatcttcagggatgaagaggaggatgaagagcattcaggaaatgacagtgatgggtcagagccttctgagaagcgcacacggttagaagaggagatagtggagcaaaccatgcggaggaggcagcggcgagagtgggaggcccggagaagagacatcctctttgactacgagcagtatgaatatcatgggacatcgtcagccatggtgatgtttgagctggcttggatgctgtccaaggacctgaatgacatgctgtggtgggccatcgttggactaacagaccagtgggtgcaagacaagatcactcaaatgaaatacgtgactgatgttggtgtcctgcagcgccacgtttcccgccacaaccaccggaacgaggatgaggagaacacactctccgtggactgcacacggatctcctttgagtatgacctccgcctggtgctctaccagcactggtccctccatgacagcctgtgcaacaccagctataccgcagccaggttcaagctgtggtctgtgcatggacagaagcggctccaggagttccttgcagacatgggtcttcccctgaagcaggtgaagcagaagttccaggccatggacatctccttgaaggagaatttgcgggaaatgattgaagagtctgcaaataaatttgggatgaaggacatgcgcgtgcagactttcagcattcattttgggttcaagcacaagtttctggccagcgacgtggtctttgccaccatgtctttgatggagagccccgagaaggatggctcagggacagatcacttcatccaggctctggacagcctctccaggagtaacctggacaagctgtaccatggcctggaactcgccaagaagcagctgcgagccacccagcagaccattgccagctgcctttgcaccaacctcgtcatctcccaggggcctttcctgtactgctctctcatggagggcactccagatgtcatgctgttctctaggccggcatccctaagcctgctcagcaaacacctgctcaagtcctttgtgtgttcgacaaagaaccggcgctgcaaactgctgcccctggtgatggctgcccccctgagcatggagcatggcacagtgaccgtggtgggcatccccccagagaccgacagctcggacaggaagaacttttttgggagggcgtttgagaaggcagcggaaagcaccagctcccggatgctgcacaaccattttgacctctcagtaattgagctgaaagctgaggatcggagcaagtttctggacgcacttatttccctcctgtcctaggaatttgattcttccagaatgaccttcttatttatgtaactggctttcatttagattgtaagttatggacatgatttgagatgtagaagccattttttattaaataaaatgcttattttaggctccgtccccaaaaaaaaaaaaaaaaaaaaaaaaaaaaa

SEQ ID NO: 80 - DNA, 3053 bp, Homo sapiens
gagcgcggctggagtttgctgctgccgctgtgcagtttgttcaggggcttgtggtggtgagtccgagaggctgcgtgtgagagacgtgagaaggatcctgcactgaggaggtggaaagaagaggattgctcgaggaggcctggggtctgtgaggcagcggagctgggtgaaggctgcgggttccggcgaggcctgagctgtgctgtcgtcatgcctcaaacccgatcccaggcacaggctacaatcagttttccaaaaaggaagctgtctcgggcattgaacaaagctaaaaactccagtgatgccaaactagaaccaacaaatgtccaaaccgtaacctgttctcctcgtgtaaaagccctgcctctcagccccaggaaacgtctgggcgatgacaacctatgcaacactccccatttacctccttgttctccaccaaagcaaggcaagaaagagaatggtccccctcactcacatacacttaagggacgaagattggtatttgacaatcagctgacaattaagtctcctagcaaaagagaactagccaaagttcaccaaaacaaaatactttcttcagttagaaaaagtcaagagatcacaacaaattctgagcagagatgtccactgaagaaagaatctgcatgtgtgagactattcaagcaagaaggcacttgctaccagcaagcaaagctggtcctgaacacagctgtcccagatcggctgcctgccagggaaagggagatggatgtcatcaggaatttcttgagggaacacatctgtgggaaaaaagctggaagcctttacctttctggtgctcctggaactggaaaaactgcctgcttaagccggattctgcaagacctcaagaaggaactgaaaggctttaaaactatcatgctgaattgcatgtccttgaggactgcccaggctgtattcccagctattgctcaggagatttgtcaggaagaggtatccaggccagctgggaaggacatgatgaggaaattggaaaaacatatgactgcagagaagggccccatgattgtgttggtattggacgagatggatcaactggacagcaaaggccaggatgtattgtacacgctatttgaatggccatggctaagcaattctcacttggtgctgattggtattgctaataccctggatctcacagatagaattctacctaggcttcaagctagagaaaaatgtaagccacagctgttgaacttcccaccttataccagaaatcagatagtcactattttgcaagatcgacttaatcaggtatctagagatcaggttctggacaatgctgcagttcaattctgtgcccgcaaagtctctgctgtttcaggagatgttcgcaaagcactggatgtttgcaggagagctattgaaattgtagagtcagatgtcaaaagccagactattctcaaaccactgtctgaatgtaaatcaccttctgagcctctgattcccaagagggttggtcttattcacatatcccaagtcatctcagaagttgatggtaacaggatgaccttgagccaagaaggagcacaagattccttccctcttcagcagaagatcttggtttgctctttgatgctcttgatcaggcagttgaaaatcaaagaggtcactctggggaagttatatgaagcctacagtaaagtctgtcgcaaacagcaggtggcggctgtggaccagtcagagtgtttgtcactttcagggctcttggaagccaggggcattttaggattaaagagaaacaaggaaacccgtttgacaaaggtgtttttcaagattgaagagaaagaaatagaacatgctctgaaagataaagctttaattggaaatatcttagctactggattgccttaaattcttctcttacaccccacccgaaagtattcagctggcatttagagagctacagtcttcattttagtgctttacacattcgggcctgaaaacaaatatgaccttttttacttgaagccaatgaattttaatctatagattctttaatattagcacagaataatatctttgggtcttactatttttacccataaaagtgaccaggtagaccctttttaattacattcactacttctaccacttgtgtatctctagccaatgtgcttgcaagtgtacagatctgtgtagaggaatgtgtgtatatttacctcttcgtttgctcaaacatgagtgggtatttttttgtttgttttttttgttgttgttgtttttgaggcgcgtctcaccctgttgcccaggctggagtgcaatggcgcgttctctgctcactacagcacccgcttcccaggttgaagtgattctcttgcctcagcctcccgagtagctgggattacaggtgcccaccaccgcgcccagctaattttttaatttttagtagagacagggttttaccatgttggccaggctggtcttgaactcctgaccctcaagtgatctgcccaccttggcctccctaagtgctgggattataggcgtgagccaccatgctcagccattaaggtattttgttaagaactttaagtttagggtaagaagaatgaaaatgatccagaaaaatgcaagcaagtccacatggagatttggaggacactggttaaagaatttatttctttgtatagtatactatgttcatggtgcagatactacaacattgtggcattttagactcgttgagtttcttgggcactcccaagggcgttggggtcataaggagactataactctacagattgtgaatatatttattttcaagttgcattctttgtctttttaagcaatcagatttcaagagagctcaagctttcagaagtcaatgtgaaaattccttcctaggctgtcccacagtctttgctgcccttagatgaagccacttgtttcaagatgactactttggggttgggttttcatctaaacacatttttccagtcttattagataaattagtccatatggttggttaatcaagagccttctgggtttggtttggtggcattaaatgg

SEQ ID NO: 81 - DNA, 3178 bp, Homo sapiens
gatctcttggagacggcgacccaggcatctggggagccacagaagtcgtactcccttaaaccctgctttgctccccctgtggatgtaaccccttagctggcattttgcatctcaattggcttgtgatggaggcgtctttggggattcagatggatgagccaatggctttttctccccagcgtgaccggtttcaggctgaaggctctttaaaaaaaaacgagcagaattttaaacttgcaggtgttaaaaaagatattgagaagctttatgaagctgtaccacagcttagtaatgtgtttaagattgaggacaaaattggagaaggcactttcagctctgtttatttggccacagcacagttacaagtaggacctgaagagaaaattgctctaaaacacttgattccaacaagtcatcctataagaattgcagctgaacttcagtgcctaacagtggctggggggcaagataatgtcatgggagttaaatactgctttaggaagaatgatcatgtagttattgctatgccatatctggagcatgagtcgtttttggacattctgaattctctttcctttcaagaagtacgggaatatatgcttaatctgttcaaagctttgaaacgcattcatcagtttggtattgttcaccgtgatgttaagcccagcaattttttatataataggcgcctgaaaaagtatgccttggtagactttggtttggcccaaggaacccatgatacgaaaatagagcttcttaaatttgtccagtctgaagctcagcaggaaaggtgttcacaaaacaaatcccacataatcacaggaaacaagattccactgagtggcccagtacctaaggagctggatcagcagtccaccacaaaagcttctgttaaaagaccctacacaaatgcacaaattcagattaaacaaggaaaagacggaaaggagggatctgtaggcctttctgtccagcgctctgtttttggagaaagaaatttcaatatacacagctccatttcacatgagagccctgcagtgaaactcatgaagcagtcaaagactgtggatgtactgtctagaaagttagcaacaaaaaagaaggctatttctacgaaagttatgaatagtgctgtgatgaggaaaactgccagttcttgcccagctagcctgacctgtgactgctatgcaacagataaagtttgtagtatttgcctttcaaggcgtcagcaggttgcccctagggcaggtacaccaggattcagagcaccagaggtcttgacaaagtgccccaatcaaactacagcaattgacatgtggtctgcaggtgtcatatttctttctttgcttagtggacgatatccattttataaagcaagtgatgatttaactgctttggcccaaattatgacaattaggggatccagagaaactatccaagctgctaaaacttttgggaaatcaatattatgtagcaaagaagttccagcacaagacttgagaaaactctgtgagagactcaggggtatggattctagcactcccaagttaacaagtgatatacaagggcatgcttctcatcaaccagctatttcagagaagactgaccataaagcttcttgcctcgttcaaacacctccaggacaatactcagggaattcatttaaaaagggggatagtaatagctgtgagcattgttttgatgagtataataccaatttagaaggctggaatgaggtacctgatgaagcttatgacctgcttgataaacttctagatctaaatccagcttcaagaataacagcagaagaagctttgttgcatccattttttaaagatatgagcttgtgataatggatcttcatttaatgtttactgttatgaggtagaataaaaaagaatactttgtaatagccacaagttcttgtttagagaccagagcaggattaataatttattttaacattttagtgtttggtggcacattctaaaatatagattaagaatacttaaaatgcctgggatagttcttgggactaacaacatgatcttctttgagttaaacctacctaagtagattttaggtgggttcctattaggtcagatttttagcttccctaattacctttcactgacatacagaaaaaggagcagttttagttttaattaattaaaattaacagatgtgatgaggattaaatgaatcaaaagacttaatttgtagattcttttagagttatgagctaggtatagtttggggaaactcaacctggtgctggtgctcttaacaattttgtaaataaagaagataatttccttttctagaggtacatattaggccttttatgaacactaaaacaatgaggaaatgttggtcatggggcaaagtatcacttaaaattgaattcatccatttttaaaaaacacttcatgaaagcattctggtgtgaattgccatttttttcttactggcttctcaattttcttccttctctgcccctacctaaaacattctcctcggaaattacatggtgctgaccacaaagtttctggatgttttattaaatattgtacgtgtttacagttgggaatttaaaataatacatacactggttgataaagggaagctgcaggaccaaggtgaagattgatagtccaaatgcttttcttttttgagttgtatattttttcacaccatcttagatataattaggtagctgctgaaaggaaaagtgaatacagaattgacggtattattggagatttttcctctgcgtagagccatccagatctctgtatcctgttttgactaagtcttaggtgggttgggaagacagataatgaagtaggcaaagagaaaaggacccaagatagaggtttatattcagaaatggtatatatcaatgacagcatatcaaacttcctatgggaaaaagtctggtgggtggtcagctgacagatttcccatttagtagtcatagaatacagaaatagtttagggacatgtattcattttgttattttgagcattgataggtcagtatatctacctaatctgtttggtaagtataggatatataaaccattaccattgatctgtcttatgccataatcttaaaaaaaaattgaatgctcttgaatttgtatattcaataaagttatccttttataaaaaaaaa

SEQ ID NO: 82 - DNA, 1139 bp, Homo sapiens
ccacgagctgttgtgcatccagaggtggaattggggcccggcattccctcctcgtcccgggctggcccttgcccccaccctgcaactcctggttgagatgggctcagccaagagcgtcccagtcacaccagcgcggcctccgccgcacaacaagcatctggctcgagtggcggacccccgttcacctagtgctggcatcctgcgcactcccatccaggtggagagctctccacagccaggcctaccagcaggggagcaactggagggtcttaaacatgcccaggactcagatccccgctctcctactcttggtattgcacggacacctatgaagaccagcagtggagaccccccaagcccactggtgaaacagctgagtgaagtatttgaaactgaagactctaaatcaaatcttcccccagagcctgttctgcccccagaggcacctttatcttctgaattggacttgcctctgggtacccagttatctgttgaggaacagatgccaccttggaaccagactgagttcccctccaaacaggtgttttccaaggaggaagcaagacagcccacagaaacccctgtggccagccagagctccgacaagccctcaagggaccctgagactcccagatcttcaggttctatgcgcaatagatggaaaccaaacagcagcaaggtactagggagatcccccctcaccatcctgcaggatgacaactcccctggcaccctgacactacgacagggtaagcggccttcacccctaagtgaaaatgttagtgaactaaaggaaggagccattcttggaactggacgacttctgaaaactggaggacgagcatgggagcaaggccaggaccatgacaaggaaaatcagcactttcccttggtggagagctaggccctgcatggccccagcaatgcagtcacccagggcctggtgatatctgtgtcctctcaccccttctttcccagggatactgaggaatggcttgttttcttagactcctcctcagctaccaaactgggactcacagctttattgggctttctttgtgtcttgtgtgtttcttttatattaaaggaagtaattttaaatgttactttaaaaaggtaaaaaaaaaaaaaaaaaaaaa

SEQ ID NO: 83 - DNA, 2319 bp, Homo sapiens
gtggagtttgaattgggtggcggttgactgtagagccgctctctctcactggcacagcgaggttttgctcagcccttgtctcgggaccgcagcctccgccgagcgccatggctcctaggaagggcagtagtcgggtggccaagaccaactccttacggaggcggaagctcgcctcctttctgaaagacttcgaccgtgaagtggaaatacgaatcaagcaaattgagtcagacaggcagaacctcctcaaggaggtggataacctctacaacatcgagatcctgcggctccccaaggctctgcgcgagatgaactggcttgactacttcgcccttggaggaaacaaacaggccctggaagaggcggcaacagctgacctggatatcaccgaaataaacaaactaacagcagaagctattcagacacccctgaaatctgccaaaacacgaaaggtaatacaggtagatgaaatgatagtggaagaggaagaagaagaagaaaatgaacgtaagaatcttcaaactgcaagagtcaaaaggtgtcctccatccaagaagagaactcagtccatacaaggaaaaggaaaagggaaaaggtcaagccgtgctaacactgttaccccagccgtgggccgattggaggtgtccatggtcaaaccaactccaggcctgacacccaggtttgactcaagggtcttcaagacccctggcctgcgtactccagcagcaggagagcggatttacaacatctcagggaatggcagccctcttgctgacagcaaagagatcttcctcactgtgccagtgggcggcggagagagcctgcgattattggccagtgacttgcagaggcacagtattgcccagctggatccagaggccttgggaaacattaagaagctctccaaccgtctcgcccaaatctgcagcagcatacggacccacaaatgagacaccaaagttgacaggatggacttttaatgggcacttctgggaccctgaagagacttcttcccttcaggcttattgtttgagtgtgaagttccagagcaaggagccatgttcctctaagggaattcaggaattcagacgtgctagtcccacaccagttaggtagagctgtctgttcaccctcccatcccagctgatcccagtcactgcttgctggggccatgccatggaagcttcccatcagtctcccagctgaatcctccctgctctctgagctgctgccttttgcctcctgcaactcaacatcctcttcaccctgccctgcctgcagttgagggggcgaagaagaaccctgtgttctcaggaagactgcctccaccaccgctacccagagaacctctgcatctggcatttctgctctctatgcttgagaccgggaggtttaggctcagataagtgagctctgggccatgagagggtaggtccagaaggtggggggaactgtacagatcagcagagcaggacagttggcagcagtgacctcagtagggaacatgtccgtctaccctctcgcactcatgacacctccccctaccagccctcctcttcctcctcctcctcctcctgtgggaggtggtcagtgggacttagggatctttcacctgctgtgcccagtagttctgaagtctgcttgtggagcagtgttttatgtttatccctgtttactgaagaccaaatactggtttggagacaacttccatgtcttgctcttctacctccctagttagtggaaatttggataagggaactgtagggcccagattctggaggttttatgtcattggccacagaataactgtctctaagctatccatggtccagtggtccctgccaagtctgtagacttcagagagcacttctctcttatggggttcatgggaacaggggtgggtgtgacttgcttggtggcctcattccatgtgtgcctgtgcctggggcatggactttgttaagcagagtcagcagtgaggtcctcattctccagccagcctctctgccctggagaatcatgtgctatgttctaagaatttgagaactagagtcctcatccccaggcttgaaggcacatggctttctcatgtagggctctctgtggtatttgttattattttgcaacaagaccattttagtaaaacagtcctgttcaagttgtattcttttaagttcttttattctcctttccctgagatttttgtatatattgttctgagtaatggtatctttgagctgattgttctaatcagagctggtacctactttcaataaattctggttttgtgttttcttttgtaaaaaaaaaaaaaaaaaa

SEQ ID NO: 84 - DNA, 1416 bp, Homo sapiens
ggagggagggtgagttagggggagacccggcccccaaggggcgggcgccgggcagggccccgcgggcggccgagggttgggcccggctcccagcccctcgccgtcctccggctgacagggggaggagcccgccgggagggccggggtctcgggctggggagccgggacgggagagcagcgcagccgggtgcaccgcggccgcgccccgggagggctgttcgggccagcgcccgccggctgctccgcgctgacagcgccgggctggggcggggcggggggctttgcaggccgccagtgtcgacatgctgctggaggaggttcgcgccggcgaccggctgagtggggcggcggcccggggcgacgtgcaggaggtgcgccgccttctgcaccgcgagctggtgcatcccgacgccctcaaccgcttcggcaagacggcgctgcaggtcatgatgtttggcagcaccgccatcgccctggagctgctgaagcaaggtgccagccccaatgtccaggacacctccggtaccagtccagtccatgacgcagcccgcactggattcctggacaccctgaaggtcctagtggagcacggggctgatgtcaacgtgcctgatggcaccggggcacttccaatccatctggcagttcaagagggtcacactgctgtggtcagctttctggcagctgaatctgatctccatcgcagggacgccaggggtctcacacccttggagctggcactgcagagaggggctcaggacctcgtggacatcctgcagggccacatggtggccccgctgtgatctggggtcaccctctccagcaagagaaccccgtggggttatgtatcagaagagaggggaagaaacactttctcttcttgtttctcctgcccactgctgcagtaggggaggagcacagtttgtggcttataggtgttggttttgggggtgtgagtgtttgggggacgtttctcatttgtttttctcactccttttggtgtgttggacagagaagggctcctgcaggccacagccacctaaacggttcagtttcttctgcgcctcaggctgctggggcctcagacgagacccaagggcagagcatttaagagtgaagtcatgacctccagggagcctagaagctggtggccttggccggctgtgctcagagacctgaagtgtgcacgttgcttcaggcatggggggtggggggagcgtcccaaatcaataagaaggtagaatgagttatgagttattcatattctgttggaagcttgttttccagtctcttgtacagcgttttaaaagaaatggattctatttattatgctttattggaaaaaatgttgtaataatttaatgtttttacccattaaattaagacttgtgcatgatcaaaaaaaaaaaaaaaaaa

SEQ ID NO: 85 - DNA, 836 bp, Homo sapiens
ccggtgagtcgccggcgctgcagagggaggcggcactggtctcgacgtggggcggccagcgatgaagccgcccagttcaatacaaacaagtgagtttgactcatcagatgaagagcctattgaagatgaacagactccaattcatatatcatggctatctttgtcacgagtgaattgttctcagtttctcggtttatgtgctcttccaggttgtaaatttaaagatgttagaagaaatgtccaaaaagatacagaagaactaaagagctgtggtatacaagacatatttgttttctgcaccagaggggaactgtcaaaatatagagtcccaaaccttctggatctctaccagcaatgtggaattatcacccatcatcatccaatcgcagatggagggactcctgacatagccagctgctgtgaaataatggaagagcttacaacctgccttaaaaattaccgaaaaaccttaatacactgctatggaggacttgggagatcttgtcttgtagctgcttgtctcctactatacctgtctgacacaatatcaccagagcaagccatagacagcctgcgagacctaagaggatccggggcaatacagaccatcaagcaatacaattatcttcatgagtttcgggacaaattagctgcacatctatcatcaagagattcacaatcaagatctgtatcaagataaaggaattcaaatagcatatatatgaccatgtctgaaatgtcagttctctagcataatttgtattgaaatgaaaccaccagtgttatcaacttgaatgtaaatgtacatgtgcagatattcctaaagttttattgac

SEQ ID NO: 86 - DNA, 1389 bp, Homo sapiens
cgcggacttctgccaagcaccggctcatgtgaggctcgcggcacagcgttctctgggctccccagaagccagcctttcgctcccggacccggcagcccgagcaggagccgtgggaccgggcgccagcaccctctgcggcgtgtcatgggcccgcgccgccggagccgaaagcccgaggccccgaggaggcgcagcccgagcccgaccccgacccccggcccctcccggcggggcccctccttaggcgcttcctcccatcaacacagtcggcggagacaaggttggctaaaggagatccgaaagcttcagaagagcacacacctcttgataaggaagctgcccttcagccgcctggcaagagaaatatgtgttaaattcactcgtggtgtggacttcaattggcaagcccaggccctattggccctacaagaggcagcagaagcatttctagttcatctctttgaggacgcctatctcctcaccttacatgcaggccgagttactctcttcccaaaggatgtgcaactggcccggaggatccggggccttgaggagggactcggctgagctcctgcacccagtgtttctgtcagtctttcctgctcagccaggggggatgataccggggactctccagagccatgactagatccaatggattctgcgatgctgtctggactttgctgtctctgaacagtatgtgtgtgttgctttaaatatttttcttttttttgagaaggagaagactgcatgactttcctctgtaacagaggtaatatatgagacaatcaacaccgttccaaaggcctgaaaataattttcagataaagagactccaaggttgactttagtttgtgagttactcatgtgactatttgaggattttgaaaacatcagatttgctgtggtatgggagaaaaggttatgtacttattattttagctctttctgtaatatttacattttttaccatatgtacatttgtacttttattttacacataagggaaaaaataagaccactttgagcagttgcctggaaggctgggcatttccatcatatagacctctgcccttcagagtagcctcaccattagtggcagcatcatgtaactgagtggactgtgcttgtcaacggatgtgtagcttttcagaaacttaattggggatgaatagaaaacctgtaagctttgatgttctggttacttctagtaaattcctgtcaaaatcaattcagaaattctaacttggagaatttaacattttactcttgtaaatcatagaagatgtatcataacagttcagaattttaaagtacattttcgatgcttttatgggtatttttgtagtttctttgtagagagataataaaaatcaaaatatttaatga

SEQ ID NO: 87 - DNA, 8630 bp, Homo sapiens
taaatttaaaggcggggcggcctgtgagccctgaagtgccggccgcggagggtcctggccattttcctgggaccagttcagcctgataggatggcggaggaaggagccgtggccgtctgcgtgcgagtgcggccgctgaacagcagagaagaatcacttggagaaactgcccaagtttactggaaaactgacaataatgtcatttatcaagttgatggaagtaaatccttcaattttgatcgtgtctttcatggtaatgaaactaccaaaaatgtgtatgaagaaatagcagcaccaatcatcgattctgccatacaaggctacaatggtactatatttgcctatggacagactgcttcaggaaaaacatataccatgatgggttcagaagatcatttgggagttatacccagggcaattcatgacattttccaaaaaattaagaagtttcctgatagggaatttctcttacgtgtatcttacatggaaatatacaatgaaaccattacagatttactctgtggcactcaaaaaatgaaacctttaattattcgagaagatgtcaataggaatgtgtatgttgctgatctcacagaagaagttgtatatacatcagaaatggctttgaaatggattacaaagggagaaaagagcaggcattatggagaaacaaaaatgaatcaaagaagcagtcgttctcataccatctttaggatgattttggaaagcagagagaagggtgaaccttctaattgtgaaggatctgttaaggtatcccatttgaatttggttgatcttgcaggcagtgaaagagctgctcaaacaggcgctgcaggtgtgcggctcaaggaaggctgtaatataaatcgaagcttatttattttgggacaagtgatcaagaaacttagtgatggacaagttggtggtttcataaattatcgagatagcaagttaacacgaattctccagaattccttgggaggaaatgcaaagacacgtattatctgcacaattactccagtatcttttgatgaaacacttactgctctccagtttgccagtactgctaaatatatgaagaatactccttatgttaatgaggtatcaactgatgaagctctcctgaaaaggtatagaaaagaaataatggatcttaaaaaacaattagaggaggtttctttagagacgcgggctcaggcaatggaaaaagaccaattggcccaacttttggaagaaaaagatttgcttcagaaagtacagaatgagaaaattgaaaacttaacacggatgctggtgacctcttcttccctcacgttgcaacaggaattaaaggctaaaagaaaacgaagagttacttggtgccttggcaaaattaacaaaatgaagaactcaaactatgcagatcaatttaatataccaacaaatataacaacaaaaacacataagctttctataaatttattacgagaaattgatgaatctgtctgttcagagtctgatgttttcagtaacactcttgatacattaagtgagatagaatggaatccagcaacaaagctactaaatcaggagaatatagaaagtgagttgaactcacttcgtgctgactatgataatctggtattagactatgaacaactacgaacagaaaaagaagaaatggaattgaaattaaaagaaaagaatgatttggatgaatttgaggctctagaaagaaaaactaaaaaagatcaagagatgcaactaattcatgaaatttcgaacttaaagaatttagttaagcatgcagaagtatataatcaagatcttgagaatgaactcagttcaaaagtagagctgcttagagaaaaggaagaccagattaagaagctacaggaatacatagactctcaaaagctagaaaatataaaaatggacttgtcatactcattggaaagcattgaagacccaaaacaaatgaagcagactctgtttgatgctgaaactgtagcccttgatgccaagagagaatcagcctttcttagaagtgaaaatctggagctgaaggagaaaatgaaagaacttgcaactacatacaagcaaatggaaaatgatattcagttatatcaaagccagttggaggcaaaaaagaaaatgcaagttgatctggagaaagaattacaatctgcttttaatgagataacaaaactcacctcccttatagatggcaaagttccaaaagatttgctctgtaatttggaattggaaggaaagattactgatcttcagaaagaactaaataaagaagttgaagaaaatgaagctttgcgggaagaagtcattttgctttcagaattgaaatctttaccttctgaagtagaaaggctgaggaaagagatacaagacaaatctgaagagctccatataataacatcagaaaaagataaattgttttctgaagtagttcataaggagagtagagttcaaggtttacttgaagaaattgggaaaacaaaagatgacctagcaactacacagtcgaattataaaagcactgatcaagaattccaaaatttcaaaacccttcatatggactttgagcaaaagtataagatggtccttgaggagaatgagagaatgaatcaggaaatagttaatctctctaaagaagcccaaaaatttgattcgagtttgggtgctttgaagaccgagctttcttacaagacccaagaacttcaggagaaaacacgtgaggttcaagaaagactaaatgagatggaacagctgaaggaacaattagaaaatagagattctacgctgcaaactgtagaaagggagaaaacactgattactgagaaactgcagcaaactttagaagaagtaaaaactttaactcaagaaaaagatgatctaaaacaactccaagaaagcttgcaaattgagagggaccaactcaaaagtgatattcacgatactgttaacatgaatatagatactcaagaacaattacgaaatgctcttgagtctctgaaacaacatcaagaaacaattaatacactaaaatcgaaaatttctgaggaagtttccaggaatttgcatatggaggaaaatacaggagaaactaaagatgaatttcagcaaaagatggttggcatagataaaaaacaggatttggaagctaaaaatacccaaacactaactgcagatgttaaggataatgagataattgagcaacaaaggaagatattttctttaatacaggagaaaaatgaactccaacaaatgttagagagtgttatagcagaaaaggaacaattgaagactgacctaaaggaaaatattgaaatgaccattgaaaaccaggaagaattaagacttcttggggatgaacttaaaaagcaacaagagatagttgcacaagaaaagaaccatgccataaagaaagaaggagagctttctaggacctgtgacagactggcagaagttgaagaaaaactaaaggaaaagagccagcaactccaagaaaaacagcaacaacttcttaatgtacaagaagagatgagtgagatgcagaaaaagattaatgaaatagagaatttaaagaatgaattaaagaacaaagaattgacattggaacatatggaaacagagaggcttgagttggctcagaaacttaatgaaaattatgaggaagtgaaatctataaccaaagaaagaaaagttctaaaggaattacagaagtcatttgaaacagagagagaccaccttagaggatatataagagaaattgaagctacaggcctacaaaccaaagaagaactaaaaattgctcatattcacctaaaagaacaccaagaaactattgatgaactaagaagaagcgtatctgagaagacagctcaaataataaatactcaggacttagaaaaatcccataccaaattacaagaagagatcccagtgcttcatgaggaacaagagttactgcctaatgtgaaagaagtcagtgagactcaggaaacaatgaatgaactggagttattaacagaacagtccacaaccaaggactcaacaacactggcaagaatagaaatggaaaggctcaggttgaatgaaaaatttcaagaaagtcaggaagagataaaatctctaaccaaggaaagagacaaccttaaaacgataaaagaagcccttgaagttaaacatgaccagctgaaagaacatattagagaaactttggctaaaatccaggagtctcaaagcaaacaagaacagtccttaaatatgaaagaaaaagacaatgaaactaccaaaatcgtgagtgagatggagcaattcaaacccaaagattcagcactactaaggatagaaatagaaatgctcggattgtccaaaagacttcaagaaagtcatgatgaaatgaaatctgtagctaaggagaaagatgacctacagaggctgcaagaagttcttcaatctgaaagtgaccagctcaaagaaaacataaaagaaattgtagctaaacacctggaaactgaagaggaacttaaagttgctcattgttgcctgaaagaacaagaggaaactattaatgagttaagagtgaatctttcagagaaggaaactgaaatatcaaccattcaaaagcagttagaagcaatcaatgataaattacagaacaagatccaagagatttatgagaaagaggaacaatttaatataaaacaaattagtgaggttcaggaaaaagtgaatgaactgaaacaattcaaggagcatcgcaaagccaaggattcagcactacaaagtatagaaagtaagatgctcgagttgaccaacagacttcaagaaagtcaagaagaaatacaaattatgattaaggaaaaagaggaaatgaaaagagtacaggaggcccttcagatagagagagaccaactgaaagaaaacactaaagaaattgtagctaaaatgaaagaatctcaagaaaaagaatatcagtttcttaagatgacagctgtcaatgagactcaggagaaaatgtgtgaaatagaacacttgaaggagcaatttgagacccagaagttaaacctggaaaacatagaaacggagaatataaggttgactcagatactacatgaaaaccttgaagaaatgagatctgtaacaaaagaaagagatgaccttaggagtgtggaggagactctcaaagtagagagagaccagctcaaggaaaaccttagagaaactataactagagacctagaaaaacaagaggagctaaaaattgttcacatgcatctgaaggagcaccaagaaactattgataaactaagagggattgtttcagagaaaacaaatgaaatatcaaatatgcaaaaggacttagaacactcaaatgatgccttaaaagcacaggatctgaaaatacaagaggaactaagaattgctcacatgcatctgaaagagcagcaggaaactattgacaaactcagaggaattgtttctgagaagacagataaactatcaaatatgcaaaaagatttagaaaattcaaatgctaaattacaagaaaagattcaagaacttaaggcaaatgaacatcaacttattacgttaaaaaaagatgtcaatgagacacagaaaaaagtgtctgaaatggagcaactaaagaaacaaataaaagaccaaagcttaactctgagtaaattagaaatagagaatttaaatttggctcagaaacttcatgaaaaccttgaagaaatgaaatctgtaatgaaagaaagagataatctaagaagagtagaggagacactcaaactggagagagaccaactcaaggaaagcctgcaagaaaccaaagctagagatctggaaatacaacaggaactaaaaactgctcgtatgctatcaaaagaacacaaagaaactgttgataaacttagagaaaaaatttcagaaaagacaattcaaatttcagacattcaaaaggatttagataaatcaaaagatgaattacagaaaaagatccaagaacttcagaaaaaagaacttcaactgcttagagtgaaagaagatgtcaatatgagtcataaaaaaattaatgaaatggaacagttgaagaagcaatttgaggcccaaaacttatctatgcaaagtgtgagaatggataacttccagttgactaagaaacttcatgaaagccttgaagaaataagaattgtagctaaagaaagagatgagctaaggaggataaaagaatctctcaaaatggaaagggaccaattcatagcaaccttaagggaaatgatagctagagaccgacagaaccaccaagtaaaacctgaaaaaaggttactaagtgatggacaacagcaccttacggaaagcctgagagaaaagtgctctagaataaaagagcttttgaagagatactcagagatggatgatcattatgagtgcttgaatagattgtctcttgacttggagaaggaaattgaattccaaaaagagctttcaatgagagttaaagcaaacctctcacttccctatttacaaaccaaacacattgaaaaactttttactgcaaaccagagatgctccatggaattccacagaatcatgaagaaactgaagtatgtgttaagctatgttacaaaaataaaagaagaacaacatgaatccatcaataaatttgaaatggattttattgatgaagtggaaaagcaaaaggaattgctaattaaaatacagcaccttcaacaagattgtgatgtaccatccagagaattaagggatctcaaattgaaccagaatatggatctacatattgaggaaattctcaaagatttctcagaaagtgagttccctagcataaagactgaatttcaacaagtactaagtaataggaaagaaatgacacagtttttggaagagtggttaaatactcgttttgatatagaaaagcttaaaaatggcatccagaaagaaaatgataggatttgtcaagtgaataacttctttaataacagaataattgccataatgaatgaatcaacagagtttgaggaaagaagtgctaccatatccaaagagtgggaacaggacctgaaatcactgaaagagaaaaatgaaaaactatttaaaaactaccaaacattgaagacttccttggcatctggtgcccaggttaatcctaccacacaagacaataagaatcctcatgttacatcaagagctacacagttaaccacagagaaaattcgagagctggaaaattcactgcatgaagctaaagaaagtgctatgcataaggaaagcaagattataaagatgcagaaagaacttgaggtgactaatgacataatagcaaaacttcaagccaaagttcatgaatcaaataaatgccttgaaaaaacaaaagagacaattcaagtacttcaggacaaagttgctttaggagctaagccatataaagaagaaattgaagatctcaaaatgaagcttgtgaaaatagacctagagaaaatgaaaaatgccaaagaatttgaaaaggaaatcagtgctacaaaagccactgtagaatatcaaaaggaagttataaggctattgagagaaaatctcagaagaagtcaacaggcccaagatacctcagtgatatcagaacatactgatcctcagccttcaaataaacccttaacttgtggaggtggcagcggcattgtacaaaacacaaaagctcttattttgaaaagtgaacatataaggctagaaaaagaaatttctaagttaaagcagcaaaatgaacagctaataaaacaaaagaatgaattgttaagcaataatcagcatctttccaatgaggtcaaaacttggaaggaaagaacccttaaaagagaggctcacaaacaagtaacttgtgagaattctccaaagtctcctaaagtgactggaacagcttctaaaaagaaacaaattacaccctctcaatgcaaggaacggaatttacaagatcctgtgccaaaggaatcaccaaaatcttgtttttttgatagccgatcaaagtctttaccatcacctcatccagttcgctattttgataactcaagtttaggcctttgtccagaggtgcaaaatgcaggagcagagagtgtggattctcagccaggtccttggcacgcctcctcaggcaaggatgtgcctgagtgcaaaactcagtagactcctctttgtcacttctctggagatccagcattccttatttggaaatgactttgtttatgtgtctatccctggtaatgatgttgtagtgcagcttaatttcaattcagtctttactttgccactagagttgaaagataagggaacaggaaatgaatgcattgtggtaatttagaatggtgatagcaataccttcttcttgcatatggtaatacttttaaaagttgaattgttttatttatttgtatattttgtaaagaataaagttattgaaagaaatgtaaagttatctacatgacttagcatattccaaagcataatacatacattaatataaaacatcattttattaacaaaattgtaaatgtttttaataccttacacattcaataaatgtttagtagttctgaatcaccaaaaaaaaaaaaaaaaaa

SEQ ID NO: 88 - DNA, 10316 bp, Homo sapiens
gagaccagaagcgggcgaattgggcaccggtggcggctgcgggcagtttgaattagactctgggctccagcccgccgaagccgcgccagaactgtactctccgagaggtcgttttcccgtccccgagagcaagtttatttacaaatgttggagtaataaagaaggcagaacaaaatgagctgggctttggaagaatggaaagaagggctgcctacaagagctcttcagaaaattcaagagcttgaaggacagcttgacaaactgaagaaggaaaagcagcaaaggcagtttcagcttgacagtctcgaggctgcgctgcagaagcaaaaacagaaggttgaaaatgaaaaaaccgagggtacaaacctgaaaagggagaatcaaagattgatggaaatatgtgaaagtctggagaaaactaagcagaagatttctcatgaacttcaagtcaaggagtcacaagtgaatttccaggaaggacaactgaattcaggcaaaaaacaaatagaaaaactggaacaggaacttaaaaggtgtaaatctgagcttgaaagaagccaacaagctgcgcagtctgcagatgtctctctgaatccatgcaatacaccacaaaaaatttttacaactccactaacaccaagtcaatattatagtggttccaagtatgaagatctaaaagaaaaatataataaagaggttgaagaacgaaaaagattagaggcagaggttaaagccttgcaggctaaaaaagcaagccagactcttccacaagccaccatgaatcaccgcgacattgcccggcatcaggcttcatcatctgtgttctcatggcagcaagagaagaccccaagtcatctttcatctaattctcaaagaactccaattaggagagatttctctgcatcttacttttctggggaacaagaggtgactccaagtcgatcaactttgcaaatagggaaaagagatgctaatagcagtttctttgacaattctagcagtcctcatcttttggatcaattaaaagcgcagaatcaagagctaagaaacaagattaatgagttggaactacgcctgcaaggacatgaaaaagaaatgaaaggccaagtgaataagtttcaagaactccaactccaactggagaaagcaaaagtggaattaattgaaaaagagaaagttttgaacaaatgtagggatgaactagtgagaacaacagcacaatacgaccaggcgtcaaccaagtatactgcattggaacaaaaactgaaaaaattgacggaagatttgagttgtcagcgacaaaatgcagaaagtgccagatgttctctggaacagaaaattaaggaaaaagaaaaggagtttcaagaggagctctcccgtcaacagcgttctttccaaacactggaccaggagtgcatccagatgaaggccagactcacccaggagttacagcaagccaagaatatgcacaacgtcctgcaggctgaactggataaactcacatcagtaaagcaacagctagaaaacaatttggaagagtttaagcaaaagttgtgcagagctgaacaggcgttccaggcgagtcagatcaaggagaatgagctgaggagaagcatggaggaaatgaagaaggaaaacaacctccttaagagtcactctgagcaaaaggccagagaagtctgccacctggaggcagaactcaagaacatcaaacagtgtttaaatcagagccagaattttgcagaagaaatgaaagcgaagaatacctctcaggaaaccatgttaagagatcttcaagaaaaaataaatcagcaagaaaactccttgactttagaaaaactgaagcttgctgtggctgatctggaaaagcagcgagattgttctcaagaccttttgaagaaaagagaacatcacattgaacaacttaatgataagttaagcaagacagagaaagagtccaaagccttgctgagtgctttagagttaaaaaagaaagaatatgaagaattgaaagaagagaaaactctgttttcttgttggaaaagtgaaaacgaaaaacttttaactcagatggaatcagaaaaggaaaacttgcagagtaaaattaatcacttggaaacttgtctgaagacacagcaaataaaaagtcatgaatacaacgagagagtaagaacgctggagatggacagagaaaacctaagtgtcgagatcagaaaccttcacaacgtgttagacagtaagtcagtggaggtagagacccagaaactagcttatatggagctacagcagaaagctgagttctcagatcagaaacatcagaaggaaatagaaaatatgtgtttgaagacttctcagcttactgggcaagttgaagatctagaacacaagcttcagttactgtcaaatgaaataatggacaaagaccggtgttaccaagacttgcatgccgaatatgagagcctcagggatctgctaaaatccaaagatgcttctctggtgacaaatgaagatcatcagagaagtcttttggcttttgatcagcagcctgccatgcatcattcctttgcaaatataattggagaacaaggaagcatgccttcagagaggagtgaatgtcgtttagaagcagaccaaagtccgaaaaattctgccatcctacaaaatagagttgattcacttgaattttcattagagtctcaaaaacagatgaactcagacctgcaaaagcagtgtgaagagttggtgcaaatcaaaggagaaatagaagaaaatctcatgaaagcagaacagatgcatcaaagttttgtggctgaaacaagtcagcgcattagtaagttacaggaagacacttctgctcaccagaatgttgttgctgaaaccttaagtgcccttgagaacaaggaaaaagagctgcaacttttaaatgataaggtagaaactgagcaggcagagattcaagaattaaaaaagagcaaccatctacttgaagactctctaaaggagctacaacttttatccgaaaccctaagcttggagaagaaagaaatgagttccatcatttctctaaataaaagggaaattgaagagctgacccaagagaatgggactcttaaggaaattaatgcatccttaaatcaagagaagatgaacttaatccagaaaagtgagagttttgcaaactatatagatgaaagggagaaaagcatttcagagttatctgatcagtacaagcaagaaaaacttattttactacaaagatgtgaagaaaccggaaatgcatatgaggatcttagtcaaaaatacaaagcagcacaggaaaagaattctaaattagaatgcttgctaaatgaatgcactagtctttgtgaaaataggaaaaatgagttggaacagctaaaggaagcatttgcaaaggaacaccaagaattcttaacaaaattagcatttgctgaagaaagaaatcagaatctgatgctagagttggagacagtgcagcaagctctgagatctgagatgacagataaccaaaacaattctaagagcgaggctggtggtttaaagcaagaaatcatgactttaaaggaagaacaaaacaaaatgcaaaaggaagttaatgacttattacaagagaatgaacagctgatgaaggtaatgaagactaaacatgaatgtcaaaatctagaatcagaaccaattaggaactctgtgaaagaaagagagagtgagagaaatcaatgtaattttaaacctcagatggatcttgaagttaaagaaatttctctagatagttataatgcgcagttggtgcaattagaagctatgctaagaaataaggaattaaaacttcaggaaagtgagaaggagaaggagtgcctgcagcatgaattacagacaattagaggagatcttgaaaccagcaatttgcaagacatgcagtcacaagaaattagtggccttaaagactgtgaaatagatgcggaagaaaagtatatttcagggcctcatgagttgtcaacaagtcaaaacgacaatgcacaccttcagtgctctctgcaaacaacaatgaacaagctgaatgagctagagaaaatatgtgaaatactgcaggctgaaaagtatgaactcgtaactgagctgaatgattcaaggtcagaatgtatcacagcaactaggaaaatggcagaagaggtagggaaactactaaatgaagttaaaatattaaatgatgacagtggtcttctccatggtgagttagtggaagacataccaggaggtgaatttggtgaacaaccaaatgaacagcaccctgtgtctttggctccattggacgagagtaattcctacgagcacttgacattgtcagacaaagaagttcaaatgcactttgccgaattgcaagagaaattcttatctttacaaagtgaacacaaaattttacatgatcagcactgtcagatgagctctaaaatgtcagagctgcagacctatgttgactcattaaaggccgaaaatttggtcttgtcaacgaatctgagaaactttcaaggtgacttggtgaaggagatgcagctgggcttggaggaggggctcgttccatccctgtcatcctcttgtgtgcctgacagctctagtcttagcagtttgggagactcctccttttacagagctcttttagaacagacaggagatatgtctcttttgagtaatttagaaggggctgtttcagcaaaccagtgcagtgtagatgaagtattttgcagcagtctgcaggaggagaatctgaccaggaaagaaaccccttcggccccagcgaagggtgttgaagagcttgagtccctctgtgaggtgtaccggcagtccctcgagaagctagaagagaaaatggaaagtcaagggattatgaaaaataaggaaattcaagagctcgagcagttattaagttctgaaaggcaagagcttgactgccttaggaagcagtatttgtcagaaaatgaacagtggcaacagaagctgacaagcgtgactctggagatggagtccaagttggcggcagaaaagaaacagacggaacaactgtcacttgagctggaagtagcacgactccagctacaaggtctggacttaagttctcggtctttgcttggcatcgacacagaagatgctattcaaggccgaaatgagagctgtgacatatcaaaagaacatacttcagaaactacagaaagaacaccaaagcatgatgttcatcagatttgtgataaagatgctcagcaggacctcaatctagacattgagaaaataactgagactggtgcagtgaaacccacaggagagtgctctggggaacagtccccagataccaattatgagcctccaggggaagataaaacccagggctcttcagaatgcatttctgaattgtcattttctggtcctaatgctttggtacctatggatttcctggggaatcaggaagatatccataatcttcaactgcgggtaaaagagacatcaaatgagaatttgagattacttcatgtgatagaggaccgtgacagaaaagttgaaagtttgctaaatgaaatgaaagaattagactcaaaactccatttacaggaggtacaactaatgaccaaaattgaagcatgcatagaattggaaaaaatagttggggaacttaagaaagaaaactcagatttaagtgaaaaattggaatatttttcttgtgatcaccaggagttactccagagagtagaaacttctgaaggcctcaattctgatttagaaatgcatgcagataaatcatcacgtgaagatattggagataatgtggccaaggtgaatgacagctggaaggagagatttcttgatgtggaaaatgagctgagtaggatcagatcggagaaagctagcattgagcatgaagccctctacctggaggctgacttagaggtagttcaaacagagaagctatgtttagaaaaagacaatgaaaataagcagaaggttattgtctgccttgaagaagaactctcagtggtcacaagtgagagaaaccagcttcgtggagaattagatactatgtcaaaaaaaaccacggcactggatcagttgtctgaaaaaatgaaggagaaaacacaagagcttgagtctcatcaaagtgagtgtctccattgcattcaggtggcagaggcagaggtgaaggaaaagacggaactccttcagactttgtcctctgatgtgagtgagctgttaaaagacaaaactcatctccaggaaaagctgcagagtttggaaaaggactcacaggcactgtctttgacaaaatgtgagctggaaaaccaaattgcacaactgaataaagagaaagaattgcttgtcaaggaatctgaaagcctgcaggccagactgagtgaatcagattatgaaaagctgaatgtctccaaggccttggaggccgcactggtggagaaaggtgagttcgcattgaggctgagctcaacacaggaggaagtgcatcagctgagaagaggcatcgagaaactgagagttcgcattgaggccgatgaaaagaagcagctgcacatcgcagagaaactgaaagaacgcgagcgggagaatgattcacttaaggataaagttgagaaccttgaaagggaattgcagatgtcagaagaaaaccaggagctagtgattcttgatgccgagaattccaaagcagaagtagagactctaaaaacacaaatagaagagatggccagaagcctgaaagtttttgaattagaccttgtcacgttaaggtctgaaaaagaaaatctgacaaaacaaatacaagaaaaacaaggtcagttgtcagaactagacaagttactctcttcatttaaaagtctgttagaagaaaaggagcaagcagagatacagatcaaagaagaatctaaaactgcagtggagatgcttcagaatcagttaaaggagctaaatgaggcagtagcagccttgtgtggtgaccaagaaattatgaaggccacagaacagagtctagacccaccaatagaggaagagcatcagctgagaaatagcattgaaaagctgagagcccgcctagaagctgatgaaaagaagcagctctgtgtcttacaacaactgaaggaaagtgagcatcatgcagatttacttaagggtagagtggagaaccttgaaagagagctagagatagccaggacaaaccaagagcatgcagctcttgaggcagagaattccaaaggagaggtagagaccctaaaagcaaaaatagaagggatgacccaaagtctgagaggtctggaattagatgttgttactataaggtcagaaaaagaaaatctgacaaatgaattacaaaaagagcaagagcgaatatctgaattagaaataataaattcatcatttgaaaatattttgcaagaaaaagagcaagagaaagtacagatgaaagaaaaatcaagcactgccatggagatgcttcaaacacaattaaaagagctcaatgagagagtggcagccctgcataatgaccaagaagcctgtaaggccaaagagcagaatcttagtagtcaagtagagtgtcttgaacttgagaaggctcagttgctacaaggccttgatgaggccaaaaataattatattgttttgcaatcttcagtgaatggcctcattcaagaagtagaagatggcaagcagaaactggagaagaaggatgaagaaatcagtagactgaaaaatcaaattcaagaccaagagcagcttgtctctaaactgtcccaggtggaaggagagcaccaactttggaaggagcaaaacttagaactgagaaatctgacagtggaattggagcagaagatccaagtgctacaatccaaaaatgcctctttgcaggacacattagaagtgctgcagagttcttacaagaatctagagaatgagcttgaattgacaaaaatggacaaaatgtcctttgttgaaaaagtaaacaaaatgactgcaaaggaaactgagctgcagagggaaatgcatgagatggcacagaaaacagcagagctgcaagaagaactcagtggagagaaaaataggctagctggagagttgcagttactgttggaagaaataaagagcagcaaagatcaattgaaggagctcacactagaaaatagtgaattgaagaagagcctagattgcatgcacaaagaccaggtggaaaaggaagggaaagtgagagaggaaatagctgaatatcagctacggcttcatgaagctgaaaagaaacaccaggctttgcttttggacacaaacaaacagtatgaagtagaaatccagacataccgagagaaattgacttctaaagaagaatgtctcagttcacagaagctggagatagaccttttaaagtctagtaaagaagagctcaataattcattgaaagctactactcagattttggaagaattgaagaaaaccaagatggacaatctaaaatatgtaaatcagttgaagaaggaaaatgaacgtgcccaggggaaaatgaagttgttgatcaaatcctgtaaacagctggaagaggaaaaggagatactgcagaaagaactctctcaacttcaagctgcacaggagaagcagaaaacaggtactgttatggataccaaggtcgatgaattaacaactgagatcaaagaactgaaagaaactcttgaagaaaaaaccaaggaggcagatgaatacttggataagtactgttccttgcttataagccatgaaaagttagagaaagctaaagagatgttagagacacaagtggcccatctgtgttcacagcaatctaaacaagattcccgagggtctcctttgctaggtccagttgttccaggaccatctccaatcccttctgttactgaaaagaggttatcatctggccaaaataaagcttcaggcaagaggcaaagatccagtggaatatgggagaatggtagaggaccaacacctgctaccccagagagcttttctaaaaaaagcaagaaagcagtcatgagtggtattcaccctgcagaagacacggaaggtactgagtttgagccagagggacttccagaagttgtaaagaaagggtttgctgacatcccgacaggaaagactagcccatatatcctgcgaagaacaaccatggcaactcggaccagcccccgcctggctgcacagaagttagcgctatccccactgagtctcggcaaagaaaatcttgcagagtcctccaaaccaacagctggtggcagcagatcacaaaaggtcaaagttgctcagcggagcccagtagattcaggcaccatcctccgagaacccaccacgaaatccgtcccagtcaataatcttcctgagagaagtccgactgacagccccagagagggcctgagggtcaagcgaggccgacttgtccccagccccaaagctggactggagtccaacggcagtgagaactgtaaggtccagtgaaggcactttgtgtgtcagtacccctgggaggtgccagtcattgaatagataaggctgtgcctacaggacttctctttagtcagggcatgctttattagtgaggagaaaacaattccttagaagtcttaaatatattgtactctttagatctcccatgtgtaggtattgaaaaagtttggaagcactgatcacctgttagcattgccattcctctactgcaatgtaaatagtataaagctatgtatataaagctttttggtaatatgttacaattaaaatgacaagcactatatcacaatctctgtttgtatgtgggttttacactaaaaaaatgcaaaacacattttattcttctaattaacagctcctaggaaaatgtagacttttgctttatgatattctatctgtagtatgaggcatggaatagttttgtatcgggaatttctcagagctgagtaaaatgaaggaaaagcatgttatgtgtttttaaggaaaatgtgcacacatatacatgtaggagtgtttatctttctcttacaatctgttttagacatctttgcttatgaaacctgtacatatgtgtgtgtgggtatgtgtttatttccagtgagggctgcaggcttcctagaggtgtgctataccatgcgtctgtcgttgtgcttttttctgtttttagaccaattttttacagttctttggtaagcattgtcgtatctggtgatggattaacatatagcctttgttttctaataaaatagtcgccttcgttttctgtaaaaaaaaaaaaaaaaaaaaaa

SEQ ID NO: 89 - DNA, 2042 bp, Homo sapiens
ggggccagtcgttcgccggaaagcatttgtctcccacctcatcataacaacaattaatttcctctggggcctgaggagggcagaatttcaaccttcggtgtgcttgggagtggcgattgtgatttacacgacaaaatgccgaggtgctcggtggagtcatggcagtgccctttgtggaagactgggacttggtgcaaaccctgggagaaggtgcctatggagaagttcaacttgctgtgaatagagtaactgaagaagcagtcgcagtgaagattgtagatatgaagcgtgccgtagactgtccagaaaatattaagaaagagatctgtatcaataaaatgctaaatcatgaaaatgtagtaaaattctatggtcacaggagagaaggcaatatccaatatttatttctggagtactgtagtggaggagagctttttgacagaatagagccagacataggcatgcctgaaccagatgctcagagattcttccatcaactcatggcaggggtggtttatctgcatggtattggaataactcacagggatattaaaccagaaaatcttctgttggatgaaagggataacctcaaaatctcagactttggcttggcaacagtatttcggtataataatcgtgagcgtttgttgaacaagatgtgtggtactttaccatatgttgctccagaacttctgaagagaagagaatttcatgcagaaccagttgatgtttggtcctgtggaatagtacttactgcaatgctcgctggagaattgccatgggaccaacccagtgacagctgtcaggagtattctgactggaaagaaaaaaaaacatacctcaacccttggaaaaaaatcgattctgctcctctagctctgctgcataaaatcttagttgagaatccatcagcaagaattaccattccagacatcaaaaaagatagatggtacaacaaacccctcaagaaaggggcaaaaaggccccgagtcacttcaggtggtgtgtcagagtctcccagtggattttctaagcacattcaatccaatttggacttctctccagtaaacagtgcttctagtgaagaaaatgtgaagtactccagttctcagccagaaccccgcacaggtctttccttatgggataccagcccctcatacattgataaattggtacaagggatcagcttttcccagcccacatgtcctgatcatatgcttttgaatagtcagttacttggcaccccaggatcctcacagaacccctggcagcggttggtcaaaagaatgacacgattctttaccaaattggatgcagacaaatcttatcaatgcctgaaagagacttgtgagaagttgggctatcaatggaagaaaagttgtatgaatcaggttactatatcaacaactgataggagaaacaataaactcattttcaaagtgaatttgttagaaatggatgataaaatattggttgacttccggctttctaagggtgatggattggagttcaagagacacttcctgaagattaaagggaagctgattgatattgtgagcagccagaaggtttggcttcctgccacatgatcggaccatcggctctggggaatcctggtgaatatagtgctgctatgttgacattattcttcctagagaagattatcctgtcctgcaaactgcaaatagtagttcctgaagtgttcacttccctgtttatccaaacatcttccaatttattttgtttgttcggcatacaaataatacctatatcttaattgtaagcaaaactttggggaaaggatgaatagaattcatttgattatttcttcatgtgtgtttagtatctgaatttgaaactcatctggtggaaaccaagtttcaggggacatgagttttccagcttttatacacacgtatctcatttttatcaaaacattttgtttaattcaaaaagtacatatttcttccatgttgatttaattctaagatgaaccaataaagacataattcttgcaaaaaaaaaaaaaaaaaaaaaaaaaa

SEQ ID NO: 90 - DNA, 7826 bp, Homo sapiens
gcggccgccccccgccgcccgccgccccgggctcgccgcgccgcgcccgcgcgtccttagcggggccaccgagcgatgcccgccgggcgcccgcgaaagtttgtcggctcctgctgaagggcagcggcgcccccgcacccccgtgccccgctccggccaggagccttcacgtaaatgggtccagtcatgcctcccagtaagaagccagaaagctcaggaattagtgtctccagtggactgagtcagtgttacgggggcagcggtttctccaaggcccttcaggaagacgatgacctcgacttttctctgcctgacatccgattagaagagggggccatggaagatgaagagctgaccaacctgaactggctgcacgagagcaagaacttgctgaagagctttggggagtcggtcctcaggagtgtcagccccgtccaggacctggacgatgacacccccccatcccctgcccactctgacatgccctacgatgccaggcagaaccccaactgcaaacccccctactccttcagctgcctcatatttatggccatcgaggactctccaaccaagcgcctgccagtgaaggatatctacaactggatcttggaacattttccgtattttgcaaatgcacctactgggtggaaaaactcagtgagacacaatttatcattgaataagtgttttaagaaagtggacaaagagaggagtcagagtattgggaaagggtcgttgtggtgcatagacccagagtatagacaaaatctaattcaggctttgaaaaagacaccttatcacccacacccacacgtgttcaatacacctcccacctgtcctcaggcatatcaaagcacatcaggtccacccatctggccgggcagtaccttcttcaagagaaatggagcccttctccaagttcctccaggagtgatccaaaatggagcgcgggtcctgagccgagggctgtttcctggcgtgcggccgctgccaatcactcccattggggtgacagcggccatgaggaatggcatcaccagctgccggatgcggactgagagtgagccatcttgtggctccccagtggtcagcggagaccccaaggaggatcacaactacagcagtgccaagtcctccaacgcccggagcacctcgcccaccagcgactccatctcctcctcctcctcctcagccgacgaccactatgagtttgccaccaaggggagccaggagggcagcgagggcagcgaggggagcttccggagccacgagagccccagcgacacggaagaggacgacaggaagcacagccagaaggagcccaaggattctctgggggacagcgggtacgcatcccagcacaagaagcgccagcacttcgccaaggccaggaaggtccccagcgacacactgcccctcaaaaagagacgcaccgaaaagccccccgagagcgatgatgaggagatgaaagaagcggcagggtccctcctgcacttagcagggatccggtcctgtttgaataacatcaccaatcggacggcaaaggggcagaaagagcaaaaggaaaccacaaaaaattaaaaacaagtcactgatttgttttgaacttacgaccatttggtttcagcatgtcaggagatttctaatgatttgtggcaatatcagcaattttttttcttttttcttgtttttggtttggttttctttcttttcttttccttttattttgttttaatttgccccctcttctttgttttggacccttaagaattttatttttaaaggagattgaagccatagaactcatattgacactcagctgttttacaaaagcttttcattatctgaagacaaaaccgaaaaagccaaaattaccattgcttcctccagcttgtcagaaacctgtggctgaatccgcagggatgtcaacgtcaatatcacaggaacacacattcggcacctagaaggcacgtgggcaaagtaatcatcgttcaggcccaacccttaggtttaaaaagtcaggttgtccatcccattgggttcactgagtgaaggcacataaagcaattgaggaggaggaggaacccctcgtccccctaggagcagacccaagcttgtggcaccaggcatctgatggtgccaggaaagccactggaattgtcacacggcgagcacagagggccggccaccagtcctcgatgcttctgaaccctgaagcccgatgacatcttacgaggtggacgttggactgttcatgcgcatcgggtgtcagtgactcatggagaagaaatggggtaaatttttagtgatgttgctaatcattgaattctgttctctattaaattaagaaaatgttccaaaagccataagcctgaagattggccctgtgcacgcacgcacacacacacacacacacacacacacacacacacacacacgaaggagagagagagaaaactgatggggaaaacaagctgtgtcttcttaactgcccaagtgaaaagcaaccaagtccaggaaattacaatagctgttaaggaaaggaaataatggtacagatctttttctgtctatcaaaactatttgatccaagtgaaaaaaaaaaaaaaactagaaagctacggaacctgccattagtattgtggtgtatttttaagattaaaggtacactgatggacaaaaaaaaaaagtaaaacatggcaaaaaataaaataactcctatactgccctcaaaatggagtttgcaattaatatcaggatttatctttgcaaaaatcagtgatttccacattcagccagtatagccagcagaaatttctgatccacaatgcatggattcctttgaagaaaaaaaagaaaaagagaaaaaaatcacaaaaacaaactttttttattcaaaagtaacaaagttcttgtaaggtaaataatgtatttagcatgaagcatgaattattttcatataaatatagaaaatagagaaaaggctatgcctgtaatttttaagccctcaggcttagagtttcttttggttttcttcttttttctttccttttctttgctttctttttttcctttttgtttttgtttttgttttttgtttttgtttttttttcgggttattttgttttggttttttgaagcaggtgtttaaggtttaaccttcttcagggacaaattctgactgttggggaacttactctgcaatataaaaatatcttcatgctctggtagggcttggatggttgaactctgtactgccttgtgtgcacttcagccccgaccccctctgattctctgttgaaaagtgtgtcctttctctctgtctgtacatgtttaacatgacgcaataatttgagggcaaacttagtagtgagtgtgtatgatagaatcaagagaattatgggacgcttacttgagaaaatcattaccatgatttggttctaggaaaaaggcagtgaataattatgcaaattagccagaagaaggggaaccgtgctaatgggccttattgggtgaggggacgagatggggttcatgtgaaggaggaagcgatgccgaggtaggaaaggccagccccagacatcctatcgccacaatgccatgtcgcaataggaagcaggggccggccatcgctaccttcagcacactgaccaacctggaattaagaccacctagattgcgagagctgaatttagaaaccagacaacgtcatgcagcccagaaactcctgttgttacctttgcctaagaaattttctttaatggcgggggcggggggcgggggtacaaagagaaatctctaaaagaatatgatcttccatccaagtggagggaaactttaaaacaaaaacacccagtactgtggctcaggatatgatgcgtgaggagagggagggaacagagatgaccttaacttttaaaaaagggactgctgtgggccaaagccaagcccatctgccaggacgaggtaatgtcagagctccatcagcccggacagtgggaactaactggtgcattccccacacttaccttccggtgggttgctgatgagagaacctgaaaaaacctacacctctacagcaggtcgaattcatgacctgaagctgaatacttccagcatatttattcagggtgtaggtgggaataaagtatcttcgcagtgctctgttccctccgtctccccagacatctgacaccctaaaagccatccacagctatggaacctgagcgacaccttgatttgtgttgtcacctgaccaagcctaaagacctccagctcagtcccccaccttcatcccaccccacagatgataaaattcagacctctctcctgaaaggcagaggttcaacattcaggactgtttctggccgaggacttcttccaattaaaacccccaccgtgggctgtctcccctcatttcatttttctaaaggggcagaggcctcttttagaaaataataaaatgcaatgtgtgtgatttacttttctgatctctttgagaaatagagaaatataaaagtgtgttcttaactccagaaccactctttttgcataaatacctcatcgggcagctttctaagtgtgattttcctgagtctcccttcgttggatctgccggaagacttgtcggggaacctttagtgagggtacttcttcctatttttcttctgtttttggaggcatacacattatgcataaccaaaacaatggctcaattgtgtttaactttgtattttgattgttgagaacaaaaacaaaaagtatcaatgtgtatgtggctgtttgtagtgaatttattggagaatgaggttgtccgtgtccttaacaagccaaggggcaggaggcaccctctcttatcccctcctccaagagcagtagagaatttaagcacaagcctatttgtgaaagaatattttgcttaagtgtcattcactttagtcttggaattccttcccaaacgtcaggtgttcttttagcttccaaactagcatatgtatccattagtctgacagatcgcctgaacaccattaagaggtgtggcgtttttgctttcatttctcctgctgggagaagtggcggttcatgtgtcattccagtatctcacatactcacacggggcaggggggagggggaaacggggaactatagcaatatttaaagatgctttggaaaccaaccgtgaacacatcaacaccacgacgtctacgattacttgctattggccctcggatacatttaagagaaagagacagtcactcttttttttcttaaatgatatacatataaacagttatttttatcctattataattgtcttttgtctttatctagtactatgtggaaagggtttgcatcatagatttttcccagccttataatataccataagctcctacttccctgcccctccctaatcagtattctttcaagagttctttggtgaagccatctatctgaaactaaaatgaaccaaacccatatttcactggtggttggagaaaaccatggccaaaacgattgtggcaggtctcaatcttgggagtttttaagaaggaatgtgccagaggccgattcccaagaacagagttttcttttgttttgcagaggcattcaatgtgtctagtgcttgctggccacagcagttactaccacagagccttctgggaggggccgttgtgttgaaggaggctcctgcctgagggacagcatcaggcagtgggctctgtagagtgagaaccaggtggaggccttctgtgcccagctcagagttctgcaccacgccaggactgcccaggccaagggctactgacgcaagttccactcattccactctgtggggggcgccttgggcctctcctggaagggctcttggagaaggaattggagttacgtacaagtgacctaaatgggaagcttttctagatgagattggattaaattccatgtgatttctctttccctttaatccaggttgggactcgtttctttctggtggatcacagctgcccagatgttgcaattgatttttatgtttctgtagagaagtatttttctttcatcttcaggattttttttgccaccaaaagaaaacattggaactctgtgtttcctcttgattgtgacttcccagtgttgacagttaagtccttagtgtcgtaggtcccagcccaccaatactatatcaaacactgttatgcacataatgcagcactgtgatctaatttaaataatacttttttattatttatactactatatataatatacatcaacacttttgctatataacctaagtgataaccctcttttagttacctgccaaactctggacttggtttatattgcagttaacacagttacaaagctgtaatggtgtctttttttcctttgtaacggaatgtgtaaatcaaagtatatacattgtgtggtgttcctgtttctggagtttcatgaggatttacacatggcattcagtgttctgtatagatctgcctacctttgtgaattcatctgttaacccctcttcctttgagagagcaccggcgatggtggttaactccttgtgttttctctctctcctactggttattcttgaattaagcacagactcgtcagctcggttgctttatcatgaataatgtgtgtgaccttgcagttcttccacagttcagcaaacaagtgctagcttcactgaccaaaaattaaggaaggaaaacacagtttttaaaacgatccatcttttaacagccgaaaccgatgtgtctatggtgctgcaccttgctgttgtacttctgaaatcagacgtgtgtgaacgatcatttctgacttaaccgtgagatgctcacgagtacccttcctgttgttttgttagcattgaaatcgagactatttatttggaatatatacaacagtgtttttccactgtatttcatttgcaaaagttgagaactgctttctctaccttttgcaaaataattgatattccatattggattctcaaagacttcgatatggtgaacctattaaacctagaaattgtattcatcctttcatgactgtggcctgagttccccagcccctctcctccttttttttagatgagatttagcacactctcagttatttaaacatgcaacatttcttgagtatgtatgttgaggccatctgagctcatagctgattcagtaaccagtttcatgctgtgtcattcacactcactacttaatactgccatggtgaaaatgtggaggaaaaatgtatccatgtgtgtctgggaagcatatacacttgtacattttttaatactctgattctgtaacatttctgagttttgttttgttttacagaaaaaaaaaaaaagtgataaagcaatcagaagaccaagaggtttactattgatgcttagggtcgtctgaccttggctggccaatagacctacacggccaaattaatttacgagagtaataatttttcaaaagccaattttttttctgtattttctgtatgaaactgccaatatcatgaatagaaagggagaaccataaaggagaaagaacgtgatgttctgttatgttcatgtaaacctaaagaaacagtgtggaggcaggcgcgatcagccgaactctagggacttggtgttgcttggaaggcatccatacctgcattttgcattcttcgtatgtaatcatattgccaaagacaaactatttcatcatttattgtaaataacacttttccccagacctaccataaagtttctgtgatgtattgtcttccagttgcaataaaaattactgagttgcatcaattgaagaaaaaaaaaaaaa

SEQ ID NO: 91 - DNA, 2733 bp, Homo sapiens
ggcagaggagcgagtgcagcggccagcagcacatccccgctccacagtcgccgcagtcgccgcagccgccgccgccgccccgcgcgcccaaccgccgcggccccctgccccgccggcctgccagtgagagagcggcgagggggcgcccggccggactctgagcctagtcctctcgcgctgcggccgcccgcgcctcctcggccgcctgtcgggcatgaaaaccaaattctgcaccgggggcgaggcggagccctcgccgctcgggctgctgctgagctgcggtagcggcagcgcggccccggcgcccggcgtggggcagcagcgcgacgccgccagcgacctcgagtccaagcagctgggcggccaacagccgccgctcgcgctgccccctccgccgccgctgccgctgccgctgccgctgccccagcccccgccgccgcagccgcccgcagacgagcagccggagccccggacgcggcgcagggcctatctgtggtgcaaggagttcctgcccggcgcctggcggggcctccgcgaggacgagttccacatcagtgtcatcagaggcggccttagcaacatgctgttccagtgctccctacctgacaccacagccacccttggtgatgagcctcggaaagtgctcctgcggctgtatggagcgattttgcagatgaggtcctgtaataaagagggatccgaacaagctcagaaagaaaatgaatttcaaggggctgaggccatggttctggagagcgttatgtttgccattctcgcagagaggtcacttgggccaaaactctatggcatctttccccaaggccgactggagcagttcatcccgagccggcgattagatactgaagaattaagtttgccagatatttctgcagaaatcgccgagaaaatggctacatttcatggtatgaaaatgccattcaataaggaaccaaaatggctttttggcacaatggaaaagtatctaaaggaagtgctgagaattaaatttactgaggaatccagaattaaaaagctccacaaattgctcagttacaatctgcccttggaactggaaaacctgagatcattgcttgaatctactccatctccagttgtattttgtcataatgactgtcaagaaggtaatatcttgttgctggaaggccgagagaattctgaaaaacagaaactgatgctcattgatttcgaatacagcagttacaattacaggggattcgacattggaaatcacttctgtgagtggatgtatgattatagctatgaaaaatacccttttttcagagcaaacatccggaagtatcccaccaagaaacaacagctccattttatttccagttacttgcctgcattccaaaatgactttgaaaacctcagtactgaagaaaaatccattataaaagaagaaatgttgcttgaagttaataggtttgcccttgcatctcatttcctctggggactgtggtccattgtacaagccaagatttcatctattgaatttgggtacatggactacgcccaagcaaggtttgatgcctatttccaccagaagaggaagcttggggtgtgactgtggggaggactccatccacctcatcactggactgcatggggaggcagcagagcggggtcccctctgtgcttcgactactgctcctgtggcaggaggctttgggtggctcactactgaacacatgtgtatgatactaaagacggtattaaaatggagcgacgtttatttcatctcttgtttacgatttcactaggactcagaaacgagatcgggaagcagaaatatagtgcaatagtgcaacatctctgaatccttttaatctagagaaggcatttcatatttgggggctaaggtttccagtcagatgaggcaaacagcaagagtaagcagtgttacttgcaggtactttggttaatgttgatttaaattttcatgaatgtgctggtgaacactgtgaccaggcttttgtagatggcgatgtgttatagacggtgctcactcccaagggacagcaagtgagcagagatgtactgcaaagtcgccagtcactgctgcaaggtggcctctgcctggggcctccagaagctgctcctttaccctcttggtcccatggctgaagctggagcagcggattgctctggagcagccaaggccgccagcgtgtggagcagagctctcccctcctgctgggcgtgtgtgacactgatgagtttcactgtactgcatgtgacttctcccctgcccttcctcctgatggagtgtgcagacagccatgcgtggccacgggggcagtgtgaggacctccctgtctcccggctcccctcccaggggagccagctgcttgacctagctctttgggcctctcctgccctctgctctgcctggagtgtcggatcctgtgagtaggctgggcctcccctgggcagggttctccaagggcccggtttcccggcccttacctttcctgatgcccctgacatcatcattcttgtgggagacagcagcctgtatgtggtgtggggcgtggatcgagtgtagctgtgaaatccatatatatgaaatgtcctgcgggatacagtcttagctgacttttttttactctgaactcttatttgaattgttttttgtgcatatatttctgctaccacagagattgtactatacaaataaaaaaataaaaacccaaaaaaaaaaaaaaaaaa

SEQ ID NO: 92 - DNA, 1322 bp, Homo sapiens; identical to SEQ ID NO: 15

SEQ ID NO: 93 - DNA, 3626 bp, Homo sapiens
gacggcttagccgcggtgcagactgcggcggcggtggtctgaggaagttctatcttggcgctaaagcggagacgcatcccccgacccgaggctacgatgagcacaccggccgtgccccaggacctgcagctgcccccgagtcagagggcgcagtccgcattcaaagagcaaagaagacaaaaactcaaggaacatctgttgagaagaaaaacgctttttgcatacaagcaggaaaatgagatgttatccagtagagatcagagagttgtgacatctgaggaccaagttcaagaagggactaaagtgctgaaacttaaaacaaaaatggctgataaagaaaacatgaagagacctgcagagagcaaaaataatacagtggtggggaaacattgtattcctttaaaaccttcaaatgaactaaccaattcaactgtagtaattgacacacataaacctaaggatagtaatcaaactccgcatttgttactaactgaagatgatccccaaagtcaacatatgacattaagccaggcatttcaccttaaaaacaatagtaaaaagaaacaaatgactacagaaaaacaaaagcaagatgctaacatgcccaagaaacctgtgcttggatcttatcgtggccagattgttcagtctaagattaattcatttagaaaacctctacaagtcaaagatgagagttctgcagcaacaaagaaactttcagccactatacctaaagccacaaaacctcagcctgtaaacaccagcagtgtaacagtgaaaagtaatagatcctccaatatgactgccactactaaatttgtgagcactacatctcagaacacacaacttgtgcgacctcctattagaagtcatcacagtaatacccgggacactgtgaaacaaggcatcagtagaacctctgccaatgttacaatccggaaagggcctcatgaaaaagaactattacaatcaaaaacagctttatctagtgtcaaaaccagttcttctcaaggtataataagaaataagactctatcaagatccatagcatctgaagttgtagccaggcctgcttcattgtctaatgataaactgatggaaaagtcagagcccgttgaccagcgaagacatactgcaggaaaagcaattgttgatagtagatcagctcagcccaaagaaacctcggaagagagaaaagctcgtctgagtgagtggaaagctggcaaaggaagagtgctaaaaaggccccctaattcagtagttactcagcatgagcctgcaggacaaaatgaaaaaccagttgggtctttttggactaccatggcagaagaagatgaacaaagattatttactgaaaaagtaaacaacacattttctgaatgcctgaacttgattaatgagggatgtccaaaagaagatatactggtcacactgaatgacctgattaaaaatattccagatgccaaaaagcttgttaagtattggatatgtcttgcacttattgaaccaatcacaagtcctattgaaaatattattgcaatctatgagaaagccattctggcaggggctcagcctattgaagagatgcgacacacgattgtagatattctaacaatgaagagtcaagaaaaagctaatttaggagaaaatatggagaagtcttgtgcaagcaaggaagaagtcagagaagtcagtattgaagatacaggtgttgatgtagatccagaaaaactggaaatggagagtaaacttcatagaaatttgctacttcaagattgtgaaaaagagcaagacaacaaaacaaaagatccaacccatgatgctaaaacccccaatacagaaacgaggacaagttgcttaattaaatataatgtgtctactacgccatacttgcaaagtgtgaaaaaaaaggtgcagtttgatggaacaaattccgcatttaaagagctgaagtttttaacaccagtgagacgttctcgacgtcttcaagagaaaacttctaaattgccagatatgttaaaagatcattatccttgtgtgtcttcattggaacagctaacggagttgggaagagaaactgatgcttttgtatgccgccctaatgcagcactgtgccgggtgtactatgaggctgatacaacataagggaaataaagctctgttagggaatggggtttttattatttgtggggtgttttgttttgagtagctttatattgctcttaggtctggagttggccatgtacctatgtatcctaagcattcacggcagtgagctcctttactaacattcatgttatggcaagagttgtcctctacattggaaagctaatcctaccttgtcagtttcaaccaactgagttttttctttaagaaaggtaaattttgtcagctagtttactatgttccttgaatataaacaggttataatactaccctgttcactttactaaatataagtacagtaatgatgcataattagaaaatgaggtattctaggtaaaatgtatgtttgccttgacatgtttttaaaagttatgatgtacctccctgcctttaaacagaatacttttttcttttttttggcctttctcagattagtcaaaaattctatagaatgactcacttcgaatactaagacacaggaggtttagcctgctttcttaccaaattcatgttacccagacttgtgttctcttgcgtcccttggactgcctgttgattgatggaaagtgtctgcactgacacttttcgtcagtagtctgtagtttcgtggcctcttttgattataactggggtcaccaagaaggtttacttaattaaataccgcatttctaagagaagatactttgtgtaagaaaagatgccacatttagtggtttaacttttgtaacttcacttgatagtttttaagcaattagaatggagttagggaaagaacatatcatactgaacaaatgtcattctagtttagatagcatttctaagataactgatactaatacttgttttcttccctataacataaaaaacttcactgttaagtcatgtcccttgaaacatgatagttacatacacagttttctctccacacataaataacaccactaaagttgttttgtaaggttccaaactaatatggcatatatcaactctacagtttcaaataaatgactttttaattgtaaaagattagttgaaaaactgtatgaatgtgaagatcacatgcttagtcatttctatgttcattccactttgtatatcttttctatttattgacttctcatgttctagagagtaggacttttattccgtgtacctgatatatatacaattaaaatatctgtataattatgttttaatgaggtttatttcaacagatattttatgaaatgcagtttaaccacagtgaatgaattttagctttgcttttgaaatacattgtaagatttgacttgaggtttttgacacttaagtacatgcttaatgatatattttcaaaagtcatcagtctacttacataaactttacctaatttttttcactttaacaaaaacataactatgcccttgttttttcatactttgacccaaaatatgccattttgaaataaaatttaagctttg

SEQ ID NO: 94 - DNA, 627 bp, Homo sapiens
agtctccggcgagttgttgcctgggctggacgtggttttgtctgctgcgcccgctcttcgcgctctcgtttcattttctgcagcgcgccacgaggatggcccacaagcagatctactactcggacaagtacttcgacgaacactacgagtaccggcatgttatgttacccagagaactttccaaacaagtacctaaaactcatctgatgtctgaagaggagtggaggagacttggtgtccaacagagtctaggctgggttcattacatgattcatgagccagaaccacatattcttctctttagacgacctcttccaaaagatcaacaaaaatgaagtttatctggggatcgtcaaatctttttcaaatttaatgtatatgtgtatataaggtagtattcagtgaatacttgagaaatgtacaaatctttcatccatacctgtgcatgagctgtattcttcacagcaacagagctcagttaaatgcaactgcaagtaggttactgtaagatgtttaagataaaagttcttccagtcagtttttctcttaagtgcctgtttgagtttactgaaacagtttacttttgttcaataaagtttgtatgttgcatttaaaaaaaaaaaaaaa

SEQ ID NO: 95 - DNA, 3321 bp, Homo sapiens
atgaagattttgatacttggtatttttctgtttttatgtagtaccccagcctgggcgaaagaaaagcattattacattggaattattgaaacgacttgggattatgcctctgaccatggggaaaagaaacttatttctgttgacacggaacattccaatatctatcttcaaaatggcccagatagaattgggagactatataagaaggccctttatcttcagtacacagatgaaacctttaggacaactatagaaaaaccggtctggcttgggtttttaggccctattatcaaagctgaaactggagataaagtttatgtacacttaaaaaaccttgcctctaggccctacacctttcattcacatggaataacttactataaggaacatgagggggccatctaccctgataacaccacagattttcaaagagcagatgacaaagtatatccaggagagcagtatacatacatgttgcttgccactgaagaacaaagtcctggggaaggagatggcaattgtgtgactaggatttaccattcccacattgatgctccaaaagatattgcctcaggactcatcggacctttaataatctgtaaaaaagattctctagataaagaaaaagaaaaacatattgaccgagaatttgtggtgatgttttctgtggtggatgaaaatttcagctggtacctagaagacaacattaaaacctactgctcagaaccagagaaagttgacaaagacaacgaagacttccaggagagtaacagaatgtattctgtgaatggatacacttttggaagtctcccaggactctccatgtgtgctgaagacagagtaaaatggtacctttttggtatgggtaatgaagttgatgtgcacgcagctttctttcacgggcaagcactgactaacaagaactaccgtattgacacaatcaacctctttcctgctaccctgtttgatgcttatatggtggcccagaaccctggagaatggatgctcagctgtcagaatctaaaccatctgaaagccggtttgcaagcctttttccaggtccaggagtgtaacaagtcttcatcaaaggataatatccgtgggaagcatgttagacactactacattgccgctgaggaaatcatctggaactatgctccctctggtatagacatcttcactaaagaaaacttaacagcacctggaagtgactcagcggtgttttttgaacaaggtaccacaagaattggaggctcttataaaaagctggtttatcgtgagtacacagatgcctccttcacaaatcgaaaggagagaggccctgaagaagagcatcttggcatcctgggtcctgtcatttgggcagaggtgggagacaccatcagagtaaccttccataacaaaggagcatatcccctcagtattgagccgattggggtgagattcaataagaacaacgagggcacatactattccccaaattacaacccccagagcagaagtgtgcctccttcagcctcccatgtggcacccacagaaacattcacctatgaatggactgtccccaaagaagtaggacccactaatgcagatcctgtgtgtctagctaagatgtattattctgctgtggatcccactaaagatatattcactgggcttattgggccaatgaaaatatgcaagaaaggaagtttacatgcaaatgggagacagaaagatgtagacaaggaattctatttgtttcctacagtatttgatgagaatgagagtttactcctggaagataatattagaatgtttacaactgcacctgatcaggtggataaggaagatgaagactttcaggaatctaataaaatgcactccatgaatggattcatgtatgggaatcagccgggtctcactatgtgcaaaggagattcggtcgtgtggtacttattcagcgccggaaatgaggccgatgtacatggaatatacttttcaggaaacacatatctgtggagaggagaacggagagacacagcaaacctcttccctcaaacaagtcttacgctccacatgtggcctgacacagaggggacttttaatgttgaatgccttacaactgatcattacacaggcggcatgaagcaaaaatatactgtgaaccaatgcaggcggcagtctgaggattccaccttctacctgggagagaggacatactatatcgcagcagtggaggtggaatgggattattccccacaaagggagtgggaaaaggagctgcatcatttacaagagcagaatgtttcaaatgcatttttagataagggagagttttacataggctcaaagtacaagaaagttgtgtatcggcagtatactgatagcacattccgtgttccagtggagagaaaagctgaagaagaacatctgggaattctaggtccacaacttcatgcagatgttggagacaaagtcaaaattatctttaaaaacatggccacaaggccctactcaatacatgcccatggggtacaaacagagagttctacagttactccaacattaccaggtgaaactctcacttacgtatggaaaatcccagaaagatctggagctggaacagaggattctgcttgtattccatgggcttattattcaactgtggatcaagttaaggacctctacagtggattaattggccccctgattgtttgtcgaagaccttacttgaaagtattcaatcccagaaggaagctggaatttgcccttctgtttctagtttttgatgagaatgaatcttggtacttagatgacaacatcaaaacatactctgatcaccccgagaaagtaaacaaagatgatgaggaattcatagaaagcaataaaatgcatgctattaatggaagaatgtttggaaacctacaaggcctcacaatgcacgtgggagatgaagtcaactggtatctgatgggaatgggcaatgaaatagacttacacactgtacattttcacggccatagcttccaatacaagcacaggggagtttatagttctgatgtctttgacattttccctggaacataccaaaccctagaaatgtttccaagaacacctggaatttggttactccactgccatgtgaccgaccacattcatgctggaatggaaaccacttacaccgttctacaaaatgaagacaccaaatctggctgaatgaaataaattggtgataagtggaaaaaagagaaaaaccaatgattcataacaatgtatgtgaaagtgtaaaatagaatgttactttggaatgactataaacattaaaagagactggagcat

SEQ ID NO: 96 - DNA, 2042 bp, Homo sapiens
agggcttcgggcccccggggccagccgccgtcctgcgaacgcgcggcgcccgggccgctgcccccttccggccccgcggcggccccgcctcctcccccgacttccttccctgagcacggcggcggcggggacgagcaccggcctgcgcgcggagccggcaccggatggtgggcgggggccagccgtgcggacccaacatgagtgaagtttcctgcaagaaacgggacgactatttggaatggccagagtattttatggctgtggccttcttatcagcacagagaagcaaagatccaaattcccaggtcggcgcctgcatcgtgaattcagaaaacaagattgtcgggattgggtacaatgggatgccaaatgggtgcagtgatgacgtgttgccttggagaaggacagcagagaataagctggacaccaaatacccgtacgtgtgccatgcggagctgaatgccatcatgaacaaaaattcgaccgatgtgaaaggctgtagtatgtatgttgccttgttcccttgtaatgaatgcgctaagctcatcatccaggcaggtataaaagaagtgattttcatgtctgataaataccatgatagtgacgaggcaactgctgcgaggctcctgtttaatatggccggggtgacattccggaaattcataccgaagtgcagcaagattgtcattgactttgattcaattaacagcagaccgagtcaaaagcttcagtgagttacatctcattcaatctccagaagattgggattatcgtcttctaagaggttgctaatgcctttcatcttgaagttacacataacttcttactagccagtatggcaaaagtaggcatctaaagaatataaagcctcaaatcttccttactgtctctcttgtcacatggaatctacatgtgtttgaactattgctttagggtttaaaataggggagcctgtggtggcctggtgcacagggctagaacgagagtgcctccccttcttgtgtcctggctggctgggatgctggtggctcttcagaggagcatcagctgtctgtcatctgctgcgatccggcagcctctcttcactgctacatgtgctggaaggacaaataaataattgtggttgtgttcttaatggggacgagcagacacactgatctgaacatctggcccaagtgaagcatggcatatagtgcccttggaagaaaattaggcctcaaatgacagtagcattgaagtgtttgctgcagagttgagggaaacccccagccaccctcccggaatccgagatagggtggcacatctgtcctgacagacgaggagtgtaactgaaccaggaatatttcctccattcctgctctcccactgcacacagggtggtggcacattatccctctggggggtggggacgcctgttgttttggctcaatttgggtttgttggtcacatggagctcttccatttcgtttagctgaataatgagttgttcctagaggagacagcctgtctctccttgttgcccccaaagcccatgccctgccgtggtggcagctggggctgtggatgggaggggtccccaacatggatgtgttgcccctcctccgcatgccaacgcagttcatgtacaaggcccctctgcaactggagagaaaattaattcctatcccgtgagtggattgtgagaaattccacccacgtggagacagcttactgcagcactgttggtgttcggagctcttctgtgccctggctccatgctttcacctacacaagcatcaccttcctaatcaccgcggggcggggagcgtgtggctgtgccccttctctttaatctcatttaatttttattaaacatgctcagtacctgtgttgagaaaaggctttctttatcctaaagattattacctttttaaagtgctcttatattttcatgagtttttattttgtctctgagattttgtattccacattctagggtattctgtaatttggctccttaccaatattattaaaatcttattaaaatctaccctaccaaagca

SEQ ID NO: 97 - DNA, 1752 bp, Homo sapiens
agggcgcagcaggccaagggggaggtgcgagcgtggacctgggacgggtctgggcggctctcggtggttggcacgggttcgcacacccattcaagcggcaggacgcacttgtcttagcagttctcgctgaccgcgctagctgcggcttctacgctccggcactctgagttcatcagcaaacgccctggcgtctgtcctcaccatgcctagcctttgggaccgcttctcgtcgtcgtccacctcctcttcgccctcgtccttgccccgaactcccaccccagatcggccgccgcgctcagcctgggggtcggcgacccgggaggaggggtttgaccgctccacgagcctggagagctcggactgcgagtccctggacagcagcaacagtggcttcgggccggaggaagacacggcttacctggatggggtgtcgttgcccgacttcgagctgctcagtgaccctgaggatgaacacttgtgtgccaacctgatgcagctgctgcaggagagcctggcccaggcgcggctgggctctcgacgccctgcgcgcctgctgatgcctagccagttggtaagccaggtgggcaaagaactactgcgcctggcctacagcgagccgtgcggcctgcggggggcgctgctggacgtctgcgtggagcagggcaagagctgccacagcgtgggccagctggcactcgaccccagcctggtgcccaccttccagctgaccctcgtgctgcgcctggactcacgactctggcccaagatccaggggctgtttagctccgccaactctcccttcctccctggcttcagccagtccctgacgctgagcactggcttccgagtcatcaagaagaagctgtacagctcggaacagctgctcattgaggagtgttgaacttcaacctgagggggccgacagtgccctccaagacagagacgactgaacttttggggtggagactagaggcaggagctgagggactgattcctgtggttggaaaactgaggcagccacctaaggtggaggtgggggaatagtgtttcccaggaagctcattgagttgtgtgcgggtggctgtgcattggggacacatacccctcagtactgtagcatgaaacaaaggcttaggggccaacaaggcttccagctggatgtgtgtgtagcatgtaccttattatttttgttactgacagttaacagtggtgtgacatccagagagcagctgggctgctcccgccccagcccggcccagggtgaaggaagaggcacgtgctcctcagagcagccggagggaggggggaggtcggaggtcgtggaggtggtttgtgtatcttactggtctgaagggaccaagtgtgtttgttgtttgttttgtatcttgtttttctgatcggagcatcactactgacctgttgtaggcagctatcttacagacgcatgaatgtaagagtaggaaggggtgggtgtcagggatcacttgggatctttgacacttgaaaaattacacctggcagctgcgtttaagccttcccccatcgtgtactgcagagttgagctggcaggggaggggctgagagggtgggggctggaacccctccccgggaggagtgccatctgggtcttccatctagaactgtttacatgaagataagatactcactgttcatgaatacacttgatgttcaagtattaagacctatgcaatattttttacttttctaataaacatgtttgttaaaacagtt

SEQ ID NO: 98 - DNA, 2080 bp, Homo sapiens
gggcttaatgacggaaggagcatggcgtggagacacctgaaaaagcgggcccaggatgctgtgatcatcctggggggaggaggacttctcttcgcctcctacctgatggccacgggagatgagcgtttctatgctgaacacctgatgccgactctgcaggggctgctggacccggagtcagcccacagactggctgttcgcttcacctccctggggctccttccacgggccagatttcaagactctgacatgctggaagtgagagttctgggccataaattccgaaatccagtaggaattgctgcaggatttgacaagcatggggaagccgtggacggactttataagatgggctttggttttgttgagataggaagtgtgactccaaaacctcaggaaggaaaccctagacccagagtcttccgcctccctgaggaccaagctgtcattaacaggtatggatttaacagtcacgggctttcagtggtggaacacaggttacgggccagacagcagaagcaggccaagctcacagaagatggactgcctctgggggtcaacttggggaagaacaagacctcagtggacgccgcggaggactacgcagaaggggtgcgcgtactgggccccctggccgactacctggtggtgaatgtgtccagccccaacactgccgggctgcggagccttcagggaaaggccgagctgcgccgcctgctgaccaaggtgctgcaggagagggatggcttgcggagagtgcacaggccggcagtcctggtgaagatcgctcctgacctcaccagccaggataaggaggacattgccagtgtggtcaaagagttgggcatcgatgggctgattgttacgaacaccaccgtgagtcgccctgcgggcctccagggtgccctgcgctctgaaacaggagggctgagtgggaagcccctccgggatttatcaactcaaaccattcgggagatgtatgcactcacccaaggccgagttcccataattggggttggtggtgtgagcagcgggcaggacgcgctggagaagatccgggcaggggcctccctggtgcagctgtacacggccctcaccttctgggggccacccgttgtgggcaaagtcaagcgggaactggaggcccttctgaaagagcagggctttggcggagtcacagatgccattggagcagatcatcggaggtgaggacagcgtctgacgggaagcctgatctggaaccttcccaaggactcaggcaagcctttgtggctggatcatgagaggagggactccatcttgagccatgtcccccagccatggcatggctgcactgtaaacgccaatcggggggtcaccaggatcaaccgcaggctttcttcagtcccttggtcagaccataaactgcatttttgattctttgtggattcaaaccctaggatccatcagtcttgcaaggacattgaatattaggaggaaaaagtcatggaaaaaataaagccatttagaacctgggtttcaacgctagccctttctggtttgccataggccctgccaagatactgcaggtccatccaggcctctgctatctgcatctgcagtgggcttcccaggaacttgactgtctttcatttgatctttatttttgtttatttaatattttaaactttattttaaaaatatttcaaacataagggcggggtgtggtggctcatgcctgtaatcccagcactttgggaggccgaggcgggcggatcacctgaggccaggagttggagaccagccaggccaccatggtgaaaccctgtctctaccaaaaatacaaaaaattagccagatattgtggcaggcacttttaatcccagctactcgggaggctgaggcaggagaattgcttgaacctgggaggcggaggttgcagtgagccaagattgcaccagtgcactccagcttgggcgacagatcaagactctgtcacacacaaaacaaacaaacaaattttcccgtttctctctgtccctttctctataacatggataaaatattcacgtcttatgtatttattaaaaaaaaaaaaaaa

SEQ ID NO: 99 - DNA, 5713 bp, Homo sapiens
ccggagggatcccaatgagctgagccgagagcctttgtgtgcagagggaggaggaggaggcggcggcggccgccgggctggagaccccgcccggggagcccccagcaggaacaatgctagcctgcctgacccgagggaacttactggacgtcctgcaggagggcttcaatgagcaacagctgcaggcctatgtggcctgggtgaatgcacagctgaagaagaggccagcagtgaagcctgtgcaggacctgcgacaagatctccgggatggggtgatcctggcatatctcatcgagattgttgcaggagaaaagctgagtggggtacagctgagtcccggtaaccaacaggagatgaagaataatgtggagaaagtgctacagtttgtggcctctaaaaagattcgtatgcaccagacttcggctaaagatattgtggatggaaacctgaagtctatcatgaggctggtccttgccttggcagctcatttcaaacctggctccagcaggacggtgaaccaaggacgggactccagagcccctctgcaaagtcaccgaccacactgtgccactgctgttgcccagggagcagctgctgctctggccgatgtgtgtcatgacatgtcccgatcaggacgggatgtctttcgatatagacagaggaacagcagcatggatgaggaaattgagaatccatactggagtgtgcgggccctagtgcagcagtacgaagggcaacaaaggtccccgtctgaatccagctgctccagcctgacttcacccagtccaatccacagtgcaaagagcgagtccattataacccagtcagaagagaaggcagattttgtgattattcccgctgaaggaatagagaacagaacagaagggacagattctccattatctcgagactggcggccagggagccctggaacctatctggagacctcatgggaagaacagctgttggaacaacaagaatatttagaaaaagaaatggaggaagcaaagaaaatgatatcaggactacaggccttactgctcaatggatccttacctgaagatgaacaggagaggcccttggccctctgtgaaccaggtgtcaatcccgaggaacaactgattataatccaaagtcgtctggatcagagtatggaggagaatcaggacttaaagaaggaactgctgaaatgtaaacaagaagccagaaacttacaggggataaaggatgccttgcagcagagattgactcagcaggacacatctgttcttcagctcaaacaagagctactgagggcaaatatggacaaagatgagctgcacaaccagaatgtggatctgcagaggaagctagatgagaggaaccggctcttgggagaatataaaaaagagctggggcagaaggatcgccttcttcagcagcaccaggccaagttagaagaagcactccggaaactctctgatgtcagttaccaccaggtggatctagagcgagagctagaacacaaagatgtcctcttggctcactgtatgaaaagagaggcagatgaggcgaccaactacaacagtcacaactctcaaagcaatggttttctccttccaacggcaggaaaaggagctacttcagtcagcaacagagggaccagcgacctgcagcttgttcgagatgctctccgcagcctgcgcaacagcttcagtggccacgatcctcagcaccacactattgacagcttggagcagggcatttctagcctcatggagcgcctgcatgttatggagacgcagaagaaacaagaaagaaaggttcgggtcaagtcacccagaactcaagtaggtagtgaataccgggagtcctggccccctaactcaaagttgcctcactcacagagctctccaactgtcagcagcacctgtactaaagtgctctatttcactgaccggtcacttacgcccttcatggtcaatataccaaagaggttggaggaggtgacgttaaaggattttaaagcagctattgatcgggaaggaaatcaccggtatcacttcaaagcactggatcctgagtttggcactgtcaaagaggagattttccatgatgatgatgccatccctggatgggaagggaaaattgtagcttgggtggaagaagaccatggagagaattaatgccaagtatcagattgagggcttatggaacctggtcactccctggctgcttcactcaggaaagggaactaaaaccagaatacactaagaagtttctagtttgtgtgccaaaacagaagcttctccaagcatgatggccacaggtcagtcctctttctgtgcctggcatatctggtacttaaaattctgtccaaatgtagaccatgggttcatctggagttccttgtccgtgggaacacagtgttctattctactctgaggacaacaaaccgaaggccttaaacgatggggatggatgatcccgcctctgtaggggcatggctgctattatctggaaattaggaattggatgcatcattcctgtgtgttacagtattattttaattggcctcaatggttgcagcaatcagagtcccagcgtttgtactcacagacaaggcaaaggtaccagcttttctgtttctttgaacctactgcaaaccaagaataactcatgaggtggtaccaaagatgaaagcccagacttcagtaatcttttgaaccagacgtggatggtgctgaattgttgcttggatggaaaaagggctgcccatgttgtgctacactatgctaaaactgtaatttagtaagaccttgggctgcctcttctgtcttaactggttctgcagcttgtccttttgcccacatagggcctatttcatgtactgttagttttctctggggactctttaactttagagccatttctttttcttcaaactgatgaacttttgtttgaaaggcataaggagtgaaaagctccttgaaaatccaggcgggtatggaaaggtgctgctacccatatctttttgactttctttgtttcatgactttaactcatggcatctcctttgtagtaaaaggagacagaccattaatttcagcatttctttgtgatttataagtactgagcatgaagtacttgtctgcccctcatttcaaggccagagttattttctatttatgtattagtctaggctgatcttttagggcacaatagaaaccatggggcgtggagcatgagttgtgaatggcagggatcattctgggtaaaaaaaacctagaatcatttctgatgtgcaacattgtcaagtgaagaagctaacagttcaactaccgagattatttgataacctgggttttctcattcatccatcaagcaccatcaaccagtcagccattattatttatatatgtattaccaaaagcagtctatctgcctgtgacctccaatgtacactgccaaacacaagagtaggacacatctgttctgggttcttgacctatctgtctccaattcatctccccttttcagccatttcaacaaactactctttggagctctgagatgacatcttgttgttttatatagatgtatcttttaaaaatagttcacgtttggagaattcttttgtactcatttgctttttgtctgagaaccatgtctatttttataactggagtgtgagttctgtatcttctcacattctgtatactgtatccattttctagagaacccagtagcttttatacagtctcttcttaccaccccttgtggtttcagaacaagctttattttattacgagtatattaatgacaactaattcctgttccaattctacctgttttagttgtgaaggtagttttgtgtaatccagttgattgctcctctggcagagagaaggagctcaaaagatacttgatgtctttcatgtaagtttacctggtcttttcctattgaagaatttttcatcagaaacgactgggaaagtttgggaaagtcagcaaaagaaagaatgcatttcgaaagcaaacagaagaaaaaagtatattctcacagtttttccccaggaagtctggagaaaaagtcctcatgtcaccaatttctctgttgcatgaattttagtgttttgctataagacagcatgagggctatcaggccaaaattcattattgtatttccaatacagtttgtcttgaatgtctgtctcttaaaccagtttttacttgtcagttttctctcagcaaacagtcttactattatgtggaatttaacttttcagagaaaatttccaaagtcctctaccttatttggcttttatctgtgtcttttggaaaaggagctgcatggcctcagtgcctccataaaaagcttaagttgagttcatgggagaacattaagatcgttttttttcccttttagctcggtaatctcatgtaccacaggtaatgaccaagcatctctgctagaggatgtaactctcataactcctgtgtaaaatgaggatcctgttggtgatcctcattccagtttccaaagcgagaggagccttctgagcagaagtatgcaagactgattctgtttggaacagtttcctatttggctgcattctaggaggcctcctgacttattcatagtattgtcgcctggtggcattggtgtggggtagcttgtcctgctacttgctaaagttctctttctttgagaaaactgaggaaccagaatgcttagagttcataaaataatctctaaaccatgttaggttaaaacaaaatgaccatctcacaaaaacgagtttagttgaatgctcaattccttacaaaatcttcatttaaggctgagtgtggtggctcatgcctgtaattccagcactttgggaggccgaggcaggaagactgcttgagcccaggagttcaagaccagcctgggcaacgtaggaagactccgtctctacatagaaattttattataaaagtagctggggatggtggcacacacctgtagtcccagctactcaggaggttgaggtgggaagattgcttgagcccaggagtttgaggttgcagtgagctgatcatgccactgcactctagcctaggctacagagcaggaccccatctccaaaaaaaaaaaaaaaaaagtcatttaaaaactgaagaatgttctcttcttgctcagttccctaaattagctggggggattgggatactttacaatttttacatttttaaatttgaagaatttgttttaaacttacttggtaatggcacttctacttactgaccaacttttcagctctttttgaccaggatggttgcaaattagggaaaatatctttatactatacatccaattcaagaggactttaattacttaaaagcatttaggtcataattaaaattattttcactgtttccataaaataagcattatgattgcacactccttctactgtctgaatttatgtaagaggtatagcttgcttaaaatacatatatatgtaaagttatattttcttagaaacatggatgtttacagccattgctttcaaagagattattactgtgtattctccctgttttacaatatgttttcatgaagactatgttacaccagaggcttctgattatcaaagtgataaccagttttaactgccggtatgtaccagatttgtgaactaatttaaaaaaccacaaactatgaataaaatggggtttgcaaactaaa

SEQ ID NO: 100 - DNA, 2768 bp, Homo sapiens
ggagctttgctgaaactgcacaaaaaatcgagccggggggttccctggtccccggcgatggggcggggagcgctgcgccgggggagggggcgggcgcggcggcgcgggccccgccgaggggggacacctggctgaggcacagctgccgccgtgcctttccgcgcgagcccagagctccgatccctgcgcgggctcgagagctcgccccgaacgggggtcttcctcctccgccgttgacaggttttgacctgtagcagagaaccaattctggagaacagcctcacttctttgattgaatacttacataatgcattggaacatgacatgagattaaggtttaataatgatagaatgaagaccacaataaaagagacctctacttagctcagcaattcttacctttcttacctatttgatgaagatgtcttttgaaaggtgtactgcaaggaacaaaatgtttgtaaattctccttttaccaaggtggataattactgtaccttcctcatggaaaaagttttatttaaagtgttatttctcattgaatactatcaaaaaggaaaaaaaaatgacctaaacttttgagatagatttggctctaggcctactctaggtgcggtacttcactatagtttataaaagatggtccctgtcagcaaagaactgtaacctgtatgagaatattatactaacatacaagaaacaagtagagaataatggaatgtaaactctggcttgctaacttaagtgtggtagaagcttgaaggaaatgtggacttaaacttatcagagaagacttataagaggatatgaaaggtgtaaattttgataccaccattgccgccttcccctcaaaaaaggtgagaactgactaaactactggtacttagaccatgtggagaaggaactgaaaatggaaacagaaacacgtctgtacagagcagagtgtcagataatagctcattttagtagagggcaataaatgccacatgagatgatcacctcagcagaaaactgggatgtggagacgctggtagcggggccaggaaggctccggacggagcaggttttctggaccacagacacactgccccggcgccctccgcaggccgctcctccccaggcccatgacagtgccccgctggtttctgccgcgctgccggactggagctcagacggccttcgccagcccccccaacccacgcagatccctgctgacctgggcaactccccaccctcgctgaaggttcgaggaccaccccgctttcccgagaggagccgggcggcgggtacttatctccgacctccggctagtgggaaaggccgcgcgaccgcccgtcctccaactacagggaccgcacgaacagcgactgggaaactgccactagaaaaagatgactgtccaactaaaacctgcatacacagctacatccttccctggaagagcacagtggaactagatcctagtacagatagcacagggattgtcaacattcttgtcacactgaaatttccttctactgatctccaaacttctaaaaatttgctgttgagaccagctgaaatgtttgaaagaagcaactaaagaaagaaactttgaaagaagcttccaaaagaagcaaccaagtctacaaaggcacagtttgactcaaatggatccaactgattagcaaatggaaaataacatggaggaatatattttgcatgacaagcatagcagctccaagtcatccctaatgaagccaaaaatttaagtgcaacccagagaatggatggttcagaatcttttttttttttgagatggagtctcgctctgtcacctaggctggagtgcggtggcatgatctcggctcactgcaagctccgcctcctgggttcacgccattctcctgcctcagccttccgggtagctgggactacaggtgcctgccaccacgcccggctaattttttgtatttttagtagagacggggtttcaccgtgttagctaggatggtctcaatctcctgacctcgtgatctgcccgcctcagcctcccaaagtgctggaattacaggcgtgagccaccgcgcccggcccagaatcttttttaaattttttattattattattttttctgagatggagtccggctctgtggccaggctggagtgcagtggcacaatctcagctcactgcaacctctgactcccaggtacaagtgattctcctgcctcagcctcctgagtagctgggataacaggcacgtgccaccacgcccagctaatttttgtatttttagtagagacggggtttcaccatgttggccaggatggtctcgatctgcctaccttggcctcccaatgtactgggattacaggcgtgagccaccgtacccggcccagaatctttgccttttgtttgcatagtttaatcttctaaaccagttgctttcccagaaaaggtgacttaaagtcatagcctttgtgttcatcaccatactctccatagttttacaaattattcagtttatttttaaaaggggtaatttttaaaatttttatttttaattccgaagcattccttttaatacattctcttgagggaaaaaaaaaatcacacatagtgattgtgtgtggtagtgattatgtgtggcctaagtggcaattgatcaataccccaatctcaagcctgtacattgttactggttgactggttggttgcctggtgggctttttgtccttccagatgtttttctaccttctgccttttccaataaagcttccattat

SEQ ID NO: 101 - DNA, 2979 bp, Homo sapiens
agcaaaccaatcgcaagcctcgttgagtggaaggggtgggatcttccccggaagttttggttaaagcccctccaatcagcggctcggtgcggcaagtttgaatttcgtggaggctcgggttgtgagggttcctgcttcggagtcggcggtggtcgtccagaccgagtgttctttactttttgtttggttgaggtttcacgctagaaggtggctcaggatgtcttcatcacattttgccagtcgacacaggaaggatataagtactgaaatgattagaactaaaattgctcataggaaatcactgtctcagaaagaaaatagacataaggaatacgaacgaaatagacactttggtttgaaagatgtaaacattccaaccttggaaggtagaattcttgttgaattagatgagacatctcaagagcttgttccagaaaagaccaatgttaagccaagggcaatgaaaactattctaggtgatcaacgaaaacagatgctccaaaaatacaaagaagaaaagcaacttcaaaaattgaaagagcagagagagaaagctaaacgaggaatatttaaagtgggtcgttatagacctgatatgccttgttttcttttatcaaaccagaatgctgtgaaagctgagccaaaaaaggctattccatcttctgtacggattacaaggtcaaaggccaaagaccaaatggagcagactaagattgataacgagagtgatgttcgagcaatccgacctggtccaagacaaacttctgaaaagaaagtgtcagacaaagagaaaaaagttgtgcagcctgtaatgcccacgtcgttgagaatgactcgatcagctactcaagcagcaaagcaggttcccagaacagtctcatctaccacagcaagaaagccagtcacaagagctgctaatgaaaacgaaccagaaggaaaggtgccaagtaaaggaagacctgccaaaaatgtagaaacaaaacccgacaagggtatttcttgtaaagtcgatagtgaagaaaatactttgaattcacaaactaatgcaacaagtggaatgaatccagatggagtcttatcaaaaatggaaaacttacctgagataaatactgcaaaaataaaagggaagaattccttcgcacctaaggattttatgtttcagccactggatggtctgaagacctatcaagtaacacctatgactcccagaagtgccaatgcttttttgacacccagttacacctggactcctttaaaaacagaagttgatgagtctcaagcaacaaaagaaattttggcacaaaaatgtaaaacttactctaccaagacaatacagcaagattcaaataaattgccatgtcctttgggtcctctaactgtttggcatgaagaacatgttttaaataaaaatgaagctactactaaaaatttaaatggccttccaataaaagaagtcccatcacttgaaagaaatgaaggtcgaattgctcagccccaccatggtgtgccatatttcagaaatatcctccagtcagaaactgagaaattaacttcacattgcttcgagtgggacaggaaacttgaattggacattccagatgatgctaaagatcttattcgcacagcagttggtcaaacaagactccttatgaaggaaaggtttaaacagtttgaaggactggttgatgattgtgaatataaacgaggtataaaggagactacctgtacagatctggatggattttgggatatggttagttttcagatagaagatgtaatccacaaattcaacaatctgatcaaacttgaggaatctgggtggcaagtcaataataatatgaatcataatatgaacaaaaatgtctttaggaaaaaagttgtctcaggtatagcaagtaaaccaaaacaggatgatgctggaagaattgcagcgagaaatcgcctagctgccataaaaaatgcaatgagagagagaattaggcaggaagaatgtgctgaaacagcagtttctgtgataccaaaggaagttgataaaatagtgttcgatgctggatttttcagagttgaaagtcctgttaaattattctcaggactttctgtctcttctgaaggcccttctcaaagacttggaacacctaagtctgtcaacaaagctgtatctcagagtagaaatgagatgggcattccacaacaaactacatcaccagaaaatgccggtcctcagaatacgaaaagtgaacatgtgaagaagactttgtttttgagtattcctgaaagcaggagcagcatagaagatgctcagtgtcctggattaccagatttaattgaagaaaaccatgttgtaaataagacagacttgaaggtggattgtttatccagtgagagaatgagtttgcctcttcttgctggtggagtagcagatgatattaatactaacaaaaaagaaggaatttcagatgttgtggaaggaatggaactgaattcttcaattacatcacaggatgttttgatgagtagccctgaaaaaaatacagcttcacaaaatagcatcttagaagaaggggaaactaaaatttctcagtcagaactatttgataataaaagtctcactactgaatgccaccttcttgattcaccaggtctaaactgcagtaatccatttactcagctggagaggagacatcaagaacatgccagacacatttcttttggtggtaacctgattactttttcacctctacaaccaggagaattttgaatttaaaaataaatccaaacattttccttcatattatcaatgcttatatattccttagactattgaaattttggagaaaatgtatttgtgttcacttctatagcatataatgttttaatattctgtgttcatcaaagtgtattttagatatactctttctcaagggaagtggggatattttgtacattttcaacacagaataaaaaatgtactgtgccttg

SEQ ID NO: 102 - DNA, 4416 bp, Homo sapiens
atgaagactccctgtattcccagtcctaagcaagggagcaaaggcaggggacagagccctgctgctcaggtgaggggccccacgtggaacgcgccggcgcgggaggggcggcctggcgcaggtcatttgggacatctgcgggttggcgcatgcgcgcgaggtgcgcaggctcgcgcctttttcccttttctaagctttctgtgttacccccggttccgctgtcttttctgtctacagtttgcgatccccgcgtccaggatggagcagctgaacgaactggagctgctgatggagaagagtttttgggaggaggcggagctgccggcggagctatttcagaagaaagtggtagcttcctttccaagaacagttctgagcacaggaatggataaccggtacctggtgttggcagtcaatactgtacagaacaaagagggaaactgtgaaaagcgcctggtcatcactgcttcacagtcactagaaaataaagaactatgcatccttaggaatgactggtgttctgttccagtagagccaggagatatcattcatttggagggagactgcacatctgacacttggataatagataaagattttggatatttgattctgtatccagacatgctgatttctggcaccagcatagccagtagtattcgatgtatgagaagagctgtcctgagtgaaacttttaggagctctgatccagccacacgccaaatgctaattggtacggttctccatgaggtgtttcaaaaagccataaataatagctttgccccagaaaagctacaagaacttgcttttcaaacaattcaagaaataagacatttgaaggaaatgtaccgcttaaatctaagtcaagatgaaataaaacaagaagtagaggactatcttccttcgttttgtaaatgggcaggagatttcatgcataaaaacacttcgactgacttccctcagatgcagctctctctgccaagtgataatagtaaggataattcaacatgtaacattgaagtcgtgaaaccaatggatattgaagaaagcatttggtcccctaggtttggattgaaaggcaaaatagatgttacagttggtgtgaaaatacatcgagggtataaaacaaaatacaagataatgccgctggaacttaaaactggcaaagaatcaaattctattgaacaccgtagtcaggttgttctgtacactctactaagccaagagagaagagctgatccagaggctggcttgcttctctacctcaagactggtcagatgtaccctgtgcctgccaaccatctagataaaagagaattattaaagctaagaaaccagatggcattctcattgtttcaccgtattagcaaatctgctactagacagaagacacagcttgcttctttgccacaaataattgaggaagagaaaacttgtaaatattgttcacaaattggcaattgtgctctttatagcagagcagttgaacaacagatggattgtagttcagtcccaattgtgatgctgcccaaaatagaagaagaaacccagcatctgaagcaaacacacttagaatatttcagcctttggtgtctaatgttaaccctggagtcacaatcgaaggataataaaaagaatcaccaaaatatctggctaatgcctgcttcggaaatggagaagagtggcagttgcattggaaacctgattagaatggaacatgtaaagatagtttgtgatgggcaatatttacataatttccaatgtaaacatggtgccatacctgtcacaaatctaatggcaggtgacagagttattgtaagtggagaagaaaggtcactgtttgctttgtctagaggatatgtgaaggagattaacatgacaacagtaacttgtttattagacagaaacttgtcggtccttccagaatcaactttgttcagattagaccaagaagaaaaaaattgtgatatagataccccattaggaaatctttccaaattgatggaaaacacgtttgtcagcaaaaaacttcgagatttaattattgactttcgtgaacctcagtttatatcctaccttagttctgttcttccacatgatgcaaaggatacagttgcctgcattctaaagggtttgaataagcctcagaggcaagcgatgaaaaaggtacttctttcaaaagactacacactcatcgtgggtatgcctgggacaggaaaaacaactacgatatgtactctcgtaagaattctctacgcctgtggttttagcgttttgttgaccagctatacacactctgctgttgacaatattcttttgaagttagccaagtttaaaataggatttttgcgtttgggtcagattcagaaggttcatccagctatccagcaatttacagagcaagaaatttgcagatcaaagtccattaaatccttagctcttctagaagaactctacaatagtcaacttatagttgcaacaacatgtatgggaataaaccatccaatattttcccgtaaaatttttgatttttgtattgtggatgaagcctctcaaattagccaaccaatttgtctgggccccctttttttttcacggagatttgtgttagtgggggaccatcagcagcttcctcccctggtgctaaaccgtgaagcaagagctcttggcatgagtgaaagcttattcaagaggctggagcagaataagagtgctgttgtacagttaaccgtgcagtacagaatgaacagtaaaattatgtccttaagtaataagctgacctatgagggcaagctggagtgtggatcagacaaagtggccaatgcagtgataaacctacgtcactttaaagatgtgaagctggaactggaattttatgctgactattctgataatccttggttgatgggagtatttgaacccaacaatcctgtttgtttccttaatacagacaaggttccagcgccagaacaagttgaaaaaggtggtgtgagcaatgtaacagaagccaaactcatagttttcctaacctccatttttgttaaggctggatgcagtccctctgatattggtattattgcaccgtacaggcagcaattaaagatcatcaatgatttattggcacgttctattgggatggtcgaagttaatacagtagacaaataccaaggaagggacaaaagtattgtcctagtatcttttgttagaagtaataaggatggaactgttggtgaactcttgaaagattggcgacgtcttaatgttgctataaccagagccaaacataaactgattcttctggggtgtgtgccctcactaaattgctatcctcctttggagaagctgcttaatcatttaaactcagaaaaattaatcattgatcttccatcaagagaacatgaaagtctttgccacatattgggtgactttcaaagagaataaaacactatttcccttgccttttcatactagggcagtatctcctctagctagtgcccatacagaaaattctatcaccatacaaaatttaatgcagtatttatgttttaaagcacaggtgtaccgaaaactgtgaaaagtctgaatttatgggttctatgcatgcatttttgcctaacctagagaaagagtttgataaatttttaccagctttgaagatggattaacttttgactttgagctttaaacttttaagtcagacatttcaggactaatttgattttgtagatatcattgtaagaactttatttgaaagactgaataaagggatttgatttgttttcatcatttaagcacagtcttgtgatgatgagaacataagtgtgattcttttctgtattttgaggtccctaatccaaagcccattttgctaggattttttctgctatcagatgtgttttcactctaaacctagtcttttatgacatgaattgattacttcctgttaattttctatcctcccttactatcctccttttttgttttcagtattcagtatttcagtattctagagtagattttgatataaaagaaaataattcttacatcatcttttgcaacaaattttgttttctgaattgataataaatttaaaaagttgattcctattttcacatatgttcatatgcccctatgtttgggggtatcactcagttttcccttttttgtgtaaagatgttttgtaaaacaaaattgtctcaaagtgattatattatatatataaaaagtaacagattttaacaaaggttaaaagattcttggggtaacagattcttctggggcttggaaatcttccatttctcttgagggttttttttaatgagtgttaaatatgttaaaatttttatttctacctcatgtgtttttttaaattattacttgaagttttttatttaataaattttttctactaatgga

SEQ ID NO: 103 - DNA, 6552 bp, Homo sapiens
atgaggagcttcaaaagagtcaactttgggactctgctaagcagccagaaggaggctgaagagttgctgcccgacttgaaggagttcctgtccaaccctccagctggttttcccagcagccgatctgatgctgagaggagacaagcttgtgatgccatcctgagggcttgcaaccagcagctgactgctaagctagcttgccctaggcatctggggagcctgctggagctggcagagctggcctgtgatggctacttagtgtctaccccacagcgtcctcccctctacctggaacgaattctctttgtcttactgcggaatgctgctgcacaaggaagcccagaggccacactccgccttgctcagcccctccatgcctgcttggtgcagtgctctcgcgaggctgctccccaggactatgaggccgtggctcggggcagcttttctctgctttggaagggggcagaagccctgttggaacggcgagctgcatttgcagctcggctgaaggccttgagcttcctagtactcttggaggatgaaagtaccccttgtgaggttcctcactttgcttctccaacagcctgtcgagcggtagctgcccatcagctatttgatgccagtggccatggtctaaatgaagcagatgctgatttcctagatgacctgctctccaggcacgtgatcagagccttggtgggtgagagagggagctcttctgggcttctttctccccagagggccctctgcctcttggagctcaccttggaacactgccgtcgcttttgctggagccgccaccatgacaaagccatcagcgcagtggagaaggctcacagttacctaaggaacaccaatctagcccctagccttcagctatgtcagctgggggttaagctgctgcaggttggggaggaaggacctcaggcagtggccaagcttctgatcaaggcatcagctgtcctgagcaagagtatggaggcaccatcacccccacttcgggcattgtatgagagctgccagttcttcctttcaggcctggaacgaggcaccaagaggcgctatagacttgatgccattctgagcctctttgcttttcttggagggtactgctctcttctgcagcagctgcgggatgatggtgtgtatgggggctcctccaagcaacagcagtcttttcttcagatgtactttcagggacttcacctctacactgtggtggtttatgactttgcccaaggctgtcagatagttgatttggctgacctgacccaactagtggacagttgtaaatctaccgttgtctggatgctggaggccttagagggcctgtcgggccaagagctgacggaccacatggggatgaccgcttcttacaccagtaatttggcctacagcttctatagtcacaagctctatgccgaggcctgtgccatctctgagccgctctgtcagcacctgggtttggtgaagccaggcacttatcccgaggtgcctcctgagaagttgcacaggtgcttccggctacaagtagagagtttgaagaaactgggtaaacaggcccagggctgcaagatggtgattttgtggctggcagccctgcaaccctgtagccctgaacacatggctgagccagtcactttctgggttcgggtcaagatggatgcggccagggctggagacaaggagctacagctaaagactctgcgagacagcctcagtggctgggacccggagaccctggccctcctgctgagggaggagctgcaggcctacaaggcggtgcgggccgacactggacaggaacgcttcaacatcatctgtgacctcctggagctgagccccgaggagacaccagccggggcctgggcacgagccacccacctggtagaactggctcaggtgctctgctaccacgactttacgcagcagaccaactgctctgctctggatgctatccgggaagccctgcagcttctggactctgtgaggcctgaggcccaggccagagatcagcttctggacgataaagcacaggccttgctgtggctttacatctgtactctggaagccaaaatacaggaaggtatcgagcgggatcggagagcccaggcccctggtaacttggaggaatttgaagtcaatgacctgaactatgaagataaactccaggaagatcgtttcctatacagtaacattgccttcaacctggctgcagatgctgctcagtccaaatgcctggaccaagccctggccctgtggaaggagctgcttacaaaggggcaggccccagctgtacggtgtctccagcagacagcagcctcactgcagatcctagcagccctctaccagctggtggcaaagcccatgcaggctctggaggtcctcctgctgctacggattgtctctgagagactgaaggaccactcgaaggcagctggctcctcctgccacatcacccagctcctcctgaccctcggctgtcccagctatgcccagttacacctggaagaggcagcatcgagcctgaagcatctcgatcagactactgacacatacctgctcctttccctgacctgtgatctgcttcgaagtcaactctactggactcaccagaaggtgaccaagggtgtctctctgctgctgtctgtgcttcgggatcctgccctccagaagtcctccaaggcttggtacttgctgcgtgtccaggtcctgcagctggtggcagcttaccttagcctcccgtcaaacaacctctcacactccctgtgggagcagctctgtgcccaaggctggcagacacctgagatagctctcatagactcccataagctcctccgaagcatcatcctcctgctgatgggcagtgacattctctcaactcagaaagcagctgtggagacatcgtttttggactatggtgaaaatctggtacaaaaatggcaggttctttcagaggtgctgagctgctcagagaagctggtctgccacctgggccgcctgggtagtgtgagtgaagccaaggccttttgcttggaggccctaaaacttacaacaaagctgcagataccacgccagtgtgccctgttcctggtgctgaagggcgagctggagctggcccgcaatgacattgatctctgtcagtcggacctgcagcaggttctgttcttgcttgagtcttgcacagagtttggtggggtgactcagcacctggactctgtgaagaaggtccacctgcagaaggggaagcagcaggcccaggtcccctgtcctccacagctcccagaggaggagctcttcctaagaggccctgctctagagctggtggccactgtggccaaggagcctggccccatagcaccttctacaaactcctccccagtcttgaaaaccaagccccagcccatacccaacttcctgtcccattcacccacctgtgactgctcgctctgcgccagccctgtcctcacagcagtctgtctgcgctgggtattggtcacggcaggggtgaggctggccatgggccaccaagcccagggtctggatctgctgcaggtcgtgctgaagggctgtcctgaagccgctgagcgcctcacccaagctctccaagcttccctgaatcataaaacacccccctccttggttccaagcctcttggatgagatcttggctcaagcatacacactgttggcactggagggcctgaaccagccatcaaacgagagcctgcagaaggttctacagtcagggctgaagtttgtagcagcacggataccccacctagagccctggcgagccagcctgctcttgatttgggccctcacaaaactaggtggcctcagctgctgtactacccaactttttgcaagctcctggggctggcagccaccattaataaaaagtgtccctggctcagagccctctaagactcagggccaaaaacgttctggacgagggcgccaaaagttagcctctgctcccctgcgcctcaataatacctctcagaaaggtctggaaggtagaggactgccctgcacacctaaacccccagaccggatcaggcaagctggccctcatgtccccttcacggtgtttgaggaagtctgccctacagagagcaagcctgaagtaccccaggcccccagggtacaacagagagtccagacgcgcctcaaggtgaacttcagtgatgacagtgacttggaagaccctgtctcagctgaggcctggctggcagaggagcctaagagacggggcactgcttcccggggccgggggcgagcaaggaagggcctgagcctaaagacggatgccgtggttgccccaggtagtgcccctgggaaccctggcctgaatggcaggagccggagggccaagaaggtggcatcaagacattgtgaggagcggcgtccccagagggccagtgaccaggccaggcctggccctgagatcatgaggaccatccctgaggaagaactgactgacaactggagaaaaatgagctttgagatcctcaggggctctgacggggaagactcagcctcaggtgggaagactccagctccgggccctgaggcagcttctggagaatgggagctgctgaggctggattccagcaagaagaagctgcccagcccatgcccagacaaggagagtgacaaggaccttggtcctcggctccagctcccctcagcccccgtagccactggtctttctaccctggactccatctgtgactccctgagtgttgctttccggggcattagtcactgtcctcctagtgggctctatgcccacctctgccgcttcctggccttgtgcctgggccaccgggatccttatgccactgctttccttgtcaccgagtctgtctccatcacctgtcgccaccagctgctcacccacctccacagacagctcagcaaggcccagaagcaccgaggatcacttgaaatagcagaccagctgcaggggctgagccttcaggagatgcctggagatgtccccctggcccgcatccagcgcctcttttccttcagggctttggaatctggccacttcccccagcctgaaaaggagagtttccaggagcgcctggctctgatccccagtggggtgactgtgtgtgtgttggccctggccaccctccagcccggaaccgtgggcaacaccctcctgctgacccggctggaaaaggacagtcccccagtcagtgtgcagattcccactggccagaacaagcttcatctgcgttcagtcctgaatgagtttgatgccatccagaaggcacagaaagagaacagcagctgtactgacaagcgagaatggtggacagggcggctggcactggaccacaggatggaggttctcatcgcttccctagagaagtctgtgctgggctgctggaaggggctgctgctgccgtccagtgaggagcccggccctgcccaggaggcctcccgcctacaggagctgctacaggactgtggctggaaatatcctgaccgcactctgctgaaaatcatgctcagtggtgccggtgccctcacccctcaggacattcaggccctggcctacgggctgtgcccaacccagccagagcgagcccaggagctcctgaatgaggcagtaggacgtctacagggcctgacagtaccaagcaatagccaccttgtcttggtcctagacaaggacttgcagaagctgccgtgggaaagcatgcccagcctccaagcactgcctgtcacccggctgccctccttccgcttcctactcagctactccatcatcaaagagtatggggcctcgccagtgctgagtcaaggggtggatccacgaagtaccttctatgtcctgaaccctcacaataacctgtcaagcacagaggagcaatttcgagccaatttcagcagtgaagctggctggagaggagtggttggggaggtgccaagacctgaacaggtgcaggaagccctgacaaagcatgatttgtatatctatgcagggcatggggctggtgcccgcttccttgatgggcaggctgtcctgcggctgagctgtcgggcagtggccctgctgtttggctgtagcagtgcggccctggctgtgcatggaaacctggagggggctggcatcgtgctcaagtacatcatggctggttgccccttgtttctgggtaatctctgggatgtgactgaccgcgacattgaccgctacacggaagctctgctgcaaggctggcttggagcaggcccaggggccccccttctctactatgtaaaccaggcccgccaagctccccgactcaagtatcttattggggctgcacctatagcctatggcttgcctgtctctctgcggtaaccccatggagctgtcttattgatgctagaagcctcataactgttctacctccaaggttagatttaatccttaggataactcttttaaagtgattttccccagtgttttatatgaaacatttccttttgatttaacctcagtataataaagatacatcatttaaaccctgaaaaaaaaaaaaaaaaaaaa

SEQ ID NO: 104 - DNA, 4071 bp, Homo sapiens
gagtccagccgctggtgcgcggagcggttcaccgtcttcggagcggttcggcccagcctttcgcccaggcgcccaggcccgctgcgcgcgtgcgtgagcgcgcctgcgccgccagggccgctgcaaggggaggagagcggccgcctcaggaggatcccttttcccccagaaattactcaatgctgaaacctctcaaagtggtattagagacgctgaaagcaccatggacgggttttatgatcagcaagtcccttttatggtcccagggaaatctcgatctgaggaatgcagagggcggcctgtgattgacagaaagaggaagtttttggacacagatctggctcacgattctgaagagctatttcaggatctcagtcaacttcaagaggcttggttagctgaagcacaagttcctgatgatgaacagtttgtcccagattttcagtctgataacctggtgcttcatgccccacctccaaccaagatcaaacgggagctgcacagcccctcctctgagctgtcgtcttgtagccatgagcaggctcttggtgctaactatggagaaaagtgcctctacaactattgtgcctatgataggaagcctccctctgggttcaagccattaacccctcctacaacccccctctcacccacccatcagaatcccctatttcccccacctcaggcaactctgcccacctcagggcatgcccctgcagctggcccagttcaaggtgtgggccccgcccccgccccccattcgcttccagagcctggaccacagcagcaaacatttgcggtcccccgaccaccacatcagcccctgcagatgccaaagatgatgcctgaaaaccagtatccatcagaacagagatttcagagacaactgtctgaaccctgccaccccttccctcctcagccaggagttcctggagataatcgccccagttaccatcggcaaatgtcagaacctattgtccctgcagctcccccgccccctcagggattcaaacaagaataccatgacccactctatgaacatggggtcccgggcatgccagggcccccagcacacgggttccagtcaccaatgggaatcaagcaggagcctcgggattactgcgtcgattcagaagtgcctaactgccagtcatcctacatgagagggggttatttctccagcagccatgaaggtttttcatatgaaaaagatccccgattatactttgacgacacttgtgttgtgcctgagagactggaaggcaaagtcaaacaggagcctaccatgtatcgagaggggcccccttaccagaggcgaggttcccttcagctgtggcagttcctggtcacccttcttgatgacccagccaatgcccacttcattgcctggacaggtcgaggcatggagttcaagctgatagaaccggaagaggttgctcggcgctggggcatccagaagaaccggccagccatgaactatgacaagctgagccgctctctccgctattactatgaaaagggcatcatgcagaaggtggctggagagcgatacgtctacaaatttgtctgtgacccagatgccctcttctccatggctttcccggataaccagcgtccgttcctgaaggcagagtccgagtgccacctcagcgaggaggacaccctgccgctgacccactttgaagacagccccgcttacctcctggacatggaccgctgcagcagcctcccctatgccgaaggctttgcttactaagtttctgagtggcggagtggccaaaccctagagctagcagttcccattcaggcaaacaagggcagtggttttgtttgtgtttttggttgttcctaaagcttgccctttgagtattatctggagaacccaagctgtctctggattggcacccttaaagacagatacattggctggggagtgggaacagggaggggcagaaaaccaccaaaaggccagtgcctcaactcttgattctgatgaggtttctgggaagagatcaaaatggagtctccttaccatggacaatacatgcaaagcaatatcttgttcaggttagtacccgcaaaacgggacatgatgtgacaatctcgatcgatcatggactactaaatggcctttacatagaagggctctgatttgcacaatttgttgaaaaatcacaaacccatagaaaagtgagtaggctaagttggggaggctcaaaccattaagggttaaaaatacatcttaaacattggaaagctcttctagctgaatctgaaatattaccccttgtctagaaaaaggggggcagtcagaacagctgttccccactccgtgttctcaaaatcataaaccatggctactcttgggaaccacccggccatgtggtcgccaagtagagcaagccccctttctcttcccaatcacgtggctgagtgtggatgacttttattttaggagaagggcgattaacacttttgacagtattttgttttgccctgatttgggggattgttttgttttggtggttgttttggaaaaacagtttataaactgatttttgtagttttggtatttaaagcaaaaaaacgaaaaacaaaaaacaaaaacaaaccttttggtaatgtgcactgtgtctttagccagggccgtgcaacttatgaagacactgcagcttgagaggggctttgctgaggcttccccttggccatgtgaaagcccgccttgttgcctgctttgtgctttctgcaccagacaacctgatggaacatttgcacctgagttgtacatttttgaagtgtgcagggcagcctggacacaagcttagattctctatgtatagttccccgtgttcactaacatgccctctctggaaagcatatgtatataacatgtgtcatgtcctttggaaacctggtcacctggtgaaaacccttgggattcttccctgggcatgactgatgacaatttccatttcatcagtttgttttgttttcctttttctttaaatcttggactttaaaccctacctgtgtgattcagtagggtttgagacttagctgtgatactgacaggtaagcaacagtgctagcattctagattcctgcctttttttaaaaagaaattattctcattgctgtattatattggaaaagttttaaacaaccaagctaaagctatgtgaaagttgagctcaaagtagaggaaaagttactggtggtaccttgctgcctgctctgctggtagaattctgtgctccccgtgacacttagtacattaagaatgactacactgttcctcgtatgtgaaggaggcagtgctgactccgtgagtgtgagacacgtgctttgaactgcttttctattcatggagcactccatagtctcaaactgtcccccttatgaccaacagcacatttgtgaagaggttcgcagggataaggggtgcactttatagctatggaaacatgagattctcctctattggaagctaattagcccacaaaggtggtaaacctgtagattgggccttaattagcattgtactctaatcaaaggactctttctaaaccatatttatagctttcttaacctacacatagtctatacatagatgcatattttacccccagctggctagagatttatttgttgtaaatgctgtatagatttggttttcctttctttacttaccctggtttggattttttttttttttttttttgaatggatttatgctgtcttagcaatatgacaataatcctctgtagcttgagctacccctcccctgctgtaacttacgtgacctgtgctgtcactgggcataggacagcggcatcacggttgcattcccattggactcatgcacctcccggatggtttttgtttttttcgggggttctttggggtttgtttgtttgcttcttttccagagtgtggaaagtctacagtgcagaaaggcttgaacctgccagctgatttgaaatactttcaccctgcgcagggccgtatgcatcctgccaagctgcgttatattctgtactgtgtacaataaagaagtttgcttttcgttta

SEQ ID NO: 105 - DNA, 3245 bp, Homo sapiens
cccgtgttctgcgttgccggccgtgggtgctctggccacagtgagttaggggcgtcggagcgggtttctccaaccgcaatcggctccgctcaaggggaggaggagagtcccttctcggaaggcctaaggaaacgtgtcgtctggaatgggcttgggggccacgcctgcacatctccgcgagacagagggataaagtgaagatggtgctgttattgttacctcgagtgccacatgcgacctctgagatatgtacacagtcattcttactatcgcactcagccattcttactacgctaaagaagaaataattattcgaggatatttgcctggcccagaagaaacttatgtaaatttcatgaactattatatccgttttcctcggagtgagagaaaactctttttagatatcatctgagagaactagtgaatcccagtcactgagtggagttgagagtctaagaacctctgaaatttgagaactgctggaccagagcctttagagctctgataaggtgtcaacagggtagttaatttggcaccatggggatacagggattgctacaatttatcaaagaagcttcagaacccatccatgtgaggaagtataaagggcaggtagtagctgtggatacatattgctggcttcacaaaggagctattgcttgtgctgaaaaactagccaaaggtgaacctactgataggtatgtaggattttgtatgaaatttgtaaatatgttactatctcatgggatcaagcctattctcgtatttgatggatgtactttaccttctaaaaaggaagtagagagatctagaagagaaagacgacaagccaatcttcttaagggaaagcaacttcttcgtgaggggaaagtctcggaagctcgagagtgtttcacccggtctatcaatatcacacatgccatggcccacaaagtaattaaagctgcccggtctcagggggtagattgcctcgtggctccctatgaagctgatgcgcagttggcctatcttaacaaagcgggaattgtgcaagccataattacagaggactcggatctcctagcttttggctgtaaaaaggtaattttaaagatggaccagtttggaaatggacttgaaattgatcaagctcggctaggaatgtgcagacagcttggggatgtattcacggaagagaagtttcgttacatgtgtattctttcaggttgtgactacctgtcatcactgcgtgggattggattagcaaaggcatgcaaagtcctaagactagccaataatccagatatagtaaaggttatcaagaaaattggacattatctcaagatgaatatcacggtaccagaggattacatcaacgggtttattcgggccaacaataccttcctctatcagctagtttttgatcccatcaaaaggaaacttattcctctgaacgcctatgaagatgatgttgatcctgaaacactaagctacgctgggcaatatgttgatgattccatagctcttcaaatagcacttggaaataaagatataaatacttttgaacagatcgatgactacaatccagacactgctatgcctgcccattcaagaagtcatagttgggatgacaaaacatgtcaaaagtcagctaatgttagcagcatttggcataggaattactctcccagaccagagtcgggtactgtttcagatgccccacaattgaaggaaaatccaagtactgtgggagtggaacgagtgattagtactaaagggttaaatctcccaaggaaatcatccattgtgaaaagaccaagaagtgcagagctgtcagaagatgacctgttgagtcagtattctctttcatttacgaagaagaccaagaaaaatagctctgaaggcaataaatcattgagcttttctgaagtgtttgtgcctgacctggtaaatggacctactaacaaaaagagtgtaagcactccacctaggacgagaaataaatttgcaacatttttacaaaggaaaaatgaagaaagtggtgcagttgtggttccagggaccagaagcaggtttttttgcagttcagattctactgactgtgtatcaaacaaagtgagcatccagcctctggatgaaactgctgtcacagataaagagaacaatctgcatgaatcagagtatggagaccaagaaggcaagagactggttgacacagatgtagcacgtaattcaagtgatgacattccgaataatcatattccaggtgatcatattccagacaaggcaacagtgtttacagatgaagagtcctactcttttgagagcagcaaatttacaaggaccatttcaccacccactttgggaacactaagaagttgttttagttggtctggaggtcttggagatttttcaagaacgccgagcccctctccaagcacagcattgcagcagttccgaagaaagagcgattcccccacctctttgcctgagaataatatgtctgatgtgtcgcagttaaagagcgaggagtccagtgacgatgagtctcatcccttacgagaaggggcatgttcttcacagtcccaggaaagtggagaattctcactgcagagttcaaatgcatcaaagctttctcagtgctctagtaaggactctgattcagaggaatctgattgcaatattaagttacttgacagtcaaagtgaccagacctccaagctatgtttatctcatttctcaaaaaaagacacacctctaaggaacaaggttcctgggctatataagtccagttctgcagactctctttctacaaccaagatcaaacctctaggacctgccagagccagtgggctgagcaagaagccggcaagcatccagaagagaaagcatcataatgccgagaacaagccggggttacagatcaaactcaatgagctctggaaaaactttggatttaaaaaagattctgaaaagcttcctccttgtaagaaacccctgtccccagtcagagataacatccaactaactccagaagcggaagaggatatatttaacaaacctgaatgtggccgtgttcaaagagcaatattccagtaaatgcagactgctgcaaagcttttgcctgcaagagaatctgatcaatttgaagtccctgtttgggaatgaggcacttatcagcatgaagaattttttctcattctgtgccattttaaaaatagaatacattttgtatattaactttaaaaaaaaaaaaaaaaaaa

SEQ ID NO: 106 - DNA, 2762 bp, Homo sapiens
tcagtcccagccaagccacgtggactgagagtcatggggagacctagggaaattaaataactcacaaacacctgtaaaaactgttacagtgactggtgtgtgtgatagagggccatgggcctgtgaaagctgcaggagggaaatcgcttactcagggagagcctggggaaatcctgccggaactgaggcctctgcagggtgagcaggagggactggagttccaggcagagggaacagcatgtacaaaggccctgtggcaagagggagtgtggagcgagagaaaggccagcgtgctggaatcagatattggacaaggagaagccagatcaaggctgtgttcggaactctttgctttatcttaagagcaatggaaagccgtcagaggttataagcaaggatgaggtacaaggaaatggtagaactagtgatctcacccagcctcactgtaaacagcgattgtctggataaactgaagtttaaccgtgctgacgctgctgtgtggactctgagtgacagacaaggcatcaccaaatcggcccccctgagagtgtcccagctcttctccagatcttgcccacgtgtcctcccccgccagccttccacagccatggcagcctacggccagacgcagtacagtgcggggatccagcaggctaccccctatacagcttacccacctccagcacaagcctatggaatcccttcctacagcatcaagacagaagacagcttgaaccattcccctggccagagtggattcctcagctatggctccagcttcagcacctcacccactggacagagcccatacacctaccagatgcacggcacaacagggttctatcaaggaggaaatggactgggcaacgcagccggtttcgggagtgtgcaccaggactatccttcctaccccggcttcccccagagccagtacccccagtattacggctcatcctacaaccctccctacgtcccggccagcagcatctgcccttcgcccctctccacgtccacctacgtcctccaggaggcatctcacaacgtccccaaccagagttccgagtcacttgctggtgaatacaacacacacaatggaccttccacaccagcgaaagagggagacacagacaggccgcaccgggcctccgacgggaagctccgaggccggtctaagaggagcagtgacccgtccccggcaggggacaatgagattgagcgtgtgttcgtgtgggacttggatgagacaataattatttttcactccttactcacggggacatttgcatccagatacgggaaggacaccacgacgtccgtgcgcattggccttatgatggaagagatgatcttcaaccttgcagatacacatctgttcttcaatgacctggaggattgtgaccagatccacgttgatgacgtctcatcagatgacaatggccaagatttaagcacatacaacttctccgctgacggcttccacagttcggccccaggagccaacctgtgcctgggctctggcgtgcacggcggcgtggactggatgaggaagctggccttccgctaccggcgggtgaaggagatgtacaatacctacaagaacaacgttggtgggttgataggcactcccaaaagggagacctggctacagctccgagctgagctggaagctctcacagacctctggctgacccactccctgaaggcactaaacctcatcaactcccggcccaactgtgtcaatgtgctggtcaccaccactcaactaattcctgccctggccaaagtcctgctatatggcctggggtctgtgtttcctattgagaacatctacagtgcaaccaagacagggaaggagagctgcttcgagaggataatgcagagattcggcagaaaagctgtctacgtggtgatcggtgatggtgtggaagaggagcaaggagcgaaaaagcacaacatgcctttctggcggatatcctgccacgcagacctggaggcactgaggcacgccctggagctggagtatttatagcaggatcagcagcatctccacctgccatctcaccctcagaccccctcgccttccccacctccccaccgagaactccagagacccagatgttggacaccaggaaggggccccacagccgagacgacgtgtccagtgaccatctcagaagccgtccatcagtccaaatgggggttctgagaaggaaagtacccaacattggcttcggagtatttgactttggggaaaagggctggctcggagtctagactcttctgtaagactcacagaacaaaagcaaggaattgctgatttggggggtgcctggtgatgaggaggggatgggtttgtcttgtcttctttttaatttatggactagtctcattactccggaattatgctcttgtacctgtgtggctgggtttcttagtcgttggtttggtttggttttttgaactggtatgtggggtggttcacagttctaatgtaagcactctattctccaagttgtgctttgtggggacaatcattctttgaacattagagaggaaggcagttcaagctgttgaaaagactattgcttatttttgtttttaaagacctacttgacgtcatgtggacagtgcacgtgccttacgctacatcttgttttctaggaagagggggatgctgggaaggaatgggtgctttgtgatggataaaaggcattaaataaaaccacgtttacattttgaaaaaaaaaaaaaaaaaaaaaaaa

SEQ ID NO: 107 - DNA, 2695 bp, Homo sapiens
caaataaaagcgatggcgattgggctgccgcgtttggcgctcggtccggtcgcgtccgacacccggtgggactcagaaggcagtggagccccggcggcggcggcggcggcgcgcgggggcgacgcgcgggaacaacgcgagtcggcgcgcgggacgaagaataatcatgggccagactgggaagaaatctgagaagggaccagtttgttggcggaagcgtgtaaaatcagagtacatgcgactgagacagctcaagaggttcagacgagctgatgaagtaaagagtatgtttagttccaatcgtcagaaaattttggaaagaacggaaatcttaaaccaagaatggaaacagcgaaggatacagcctgtgcacatcctgacttctgtgagctcattgcgcgggactagggagtgttcggtgaccagtgacttggattttccaacacaagtcatcccattaaagactctgaatgcagttgcttcagtacccataatgtattcttggtctcccctacagcagaattttatggtggaagatgaaactgttttacataacattccttatatgggagatgaagttttagatcaggatggtactttcattgaagaactaataaaaaattatgatgggaaagtacacggggatagagaatgtgggtttataaatgatgaaatttttgtggagttggtgaatgcccttggtcaatataatgatgatgacgatgatgatgatggagacgatcctgaagaaagagaagaaaagcagaaagatctggaggatcaccgagatgataaagaaagccgcccacctcggaaatttccttctgataaaatttttgaagccatttcctcaatgtttccagataagggcacagcagaagaactaaaggaaaaatataaagaactcaccgaacagcagctcccaggcgcacttcctcctgaatgtacccccaacatagatggaccaaatgctaaatctgttcagagagagcaaagcttacactcctttcatacgcttttctgtaggcgatgttttaaatatgactgcttcctacatcgtaagtgcaattattcttttcatgcaacacccaacacttataagcggaagaacacagaaacagctctagacaacaaaccttgtggaccacagtgttaccagcatttggagggagcaaaggagtttgctgctgctctcaccgctgagcggataaagaccccaccaaaacgtccaggaggccgcagaagaggacggcttcccaataacagtagcaggcccagcacccccaccattaatgtgctggaatcaaaggatacagacagtgatagggaagcagggactgaaacggggggagagaacaatgataaagaagaagaagagaagaaagatgaaacttcgagctcctctgaagcaaattctcggtgtcaaacaccaataaagatgaagccaaatattgaacctcctgagaatgtggagtggagtggtgctgaagcctcaatgtttagagtcctcattggcacttactatgacaatttctgtgccattgctaggttaattgggaccaaaacatgtagacaggtgtatgagtttagagtcaaagaatctagcatcatagctccagctcccgctgaggatgtggatactcctccaaggaaaaagaagaggaaacaccggttgtgggctgcacactgcagaaagatacagctgaaaaaggacggctcctctaaccatgtttacaactatcaaccctgtgatcatccacggcagccttgtgacagttcgtgcccttgtgtgatagcacaaaatttttgtgaaaagttttgtcaatgtagttcagagtgtcaaaaccgctttccgggatgccgctgcaaagcacagtgcaacaccaagcagtgcccgtgctacctggctgtccgagagtgtgaccctgacctctgtcttacttgtggagccgctgaccattgggacagtaaaaatgtgtcctgcaagaactgcagtattcagcggggctccaaaaagcatctattgctggcaccatctgacgtggcaggctgggggatttttatcaaagatcctgtgcagaaaaatgaattcatctcagaatactgtggagagattatttctcaagatgaagctgacagaagagggaaagtgtatgataaatacatgtgcagctttctgttcaacttgaacaatgattttgtggtggatgcaacccgcaagggtaacaaaattcgttttgcaaatcattcggtaaatccaaactgctatgcaaaagttatgatggttaacggtgatcacaggataggtatttttgccaagagagccatccagactggcgaagagctgttttttgattacagatacagccaggctgatgccctgaagtatgtcggcatcgaaagagaaatggaaatcccttgacatctgctacctcctcccccctcctctgaaacagctgccttagcttcaggaacctcgagtactgtgggcaatttagaaaaagaacatgcagtttgaaattctgaatttgcaaagtactgtaagaataatttatagtaatgagtttaaaaatcaactttttattgccttctcaccagctgcaaagtgttttgtaccagtgaatttttgcaataatgcagtatggtacatttttcaactttgaataaagaatacttgaacttgtcaaaaaaaaaa

SEQ ID NO: 108 - DNA, 2755 bp, Homo sapiens
cctacccgcgcgcaggccaagttgctgaatcaatggagccctccccaacccgggcgttccccagcgaggcttccttcccatcctcctgaccaccggggcttttcgtgagctcgtctctgatctcgcgcaagagtgacacacaggtgttcaaagacgcttctggggagtgagggaagcggtttacgagtgacttggctggagcctcaggggcgggcactggcacggaacacaccctgaggccagccctggctgcccaggcggagctgcctcttctcccgcgggttggtggacccgctcagtacggagttggggaagctctttcacttcggaggattgctcaacaaccatgctgggcatctggaccctcctacctctggttcttacgtctgttgctagattatcgtccaaaagtgttaatgcccaagtgactgacatcaactccaagggattggaattgaggaagactgttactacagttgagactcagaacttggaaggcctgcatcatgatggccaattctgccataagccctgtcctccaggtgaaaggaaagctagggactgcacagtcaatggggatgaaccagactgcgtgccctgccaagaagggaaggagtacacagacaaagcccatttttcttccaaatgcagaagatgtagattgtgtgatgaaggacatggcttagaagtggaaataaactgcacccggacccagaataccaagtgcagatgtaaaccaaactttttttgtaactctactgtatgtgaacactgtgacccttgcaccaaatgtgaacatggaatcatcaaggaatgcacactcaccagcaacaccaagtgcaaagaggaaggatccagatctaacttggggtggctttgtcttcttcttttgccaattccactaattgtttgggtgaagagaaaggaagtacagaaaacatgcagaaagcacagaaaggaaaaccaaggttctcatgaatctccaaccttaaatcctgaaacagtggcaataaatttatctgatgttgacttgagtaaatatatcaccactattgctggagtcatgacactaagtcaagttaaaggctttgttcgaaagaatggtgtcaatgaagccaaaatagatgagatcaagaatgacaatgtccaagacacagcagaacagaaagttcaactgcttcgtaattggcatcaacttcatggaaagaaagaagcgtatgacacattgattaaagatctcaaaaaagccaatctttgtactcttgcagagaaaattcagactatcatcctcaaggacattactagtgactcagaaaattcaaacttcagaaatgaaatccaaagcttggtctagagtgaaaaacaacaaattcagttctgagtatatgcaattagtgtttgaaaagattcttaatagctggctgtaaatactgcttggttttttactgggtacattttatcatttattagcgctgaagagccaacatatttgtagatttttaatatctcatgattctgcctccaaggatgtttaaaatctagttgggaaaacaaacttcatcaagagtaaatgcagtggcatgctaagtacccaaataggagtgtatgcagaggatgaaagattaagattatgctctggcatctaacatatgattctgtagtatgaatgtaatcagtgtatgttagtacaaatgtctatccacaggctaaccccactctatgaatcaatagaagaagctatgaccttttgctgaaatatcagttactgaacaggcaggccactttgcctctaaattacctctgataattctagagattttaccatatttctaaactttgtttataactctgagaagatcatatttatgtaaagtatatgtatttgagtgcagaatttaaataaggctctacctcaaagacctttgcacagtttattggtgtcatattatacaatatttcaattgtgaattcacatagaaaacattaaattataatgtttgactattatatatgtgtatgcattttactggctcaaaactacctacttctttctcaggcatcaaaagcattttgagcaggagagtattactagagctttgccacctctccatttttgccttggtgctcatcttaatggcctaatgcacccccaaacatggaaatatcaccaaaaaatacttaatagtccaccaaaaggcaagactgcccttagaaattctagcctggtttggagatactaactgctctcagagaaagtagctttgtgacatgtcatgaacccatgtttgcaatcaaagatgataaaatagattcttatttttcccccacccccgaaaatgttcaataatgtcccatgtaaaacctgctacaaatggcagcttatacatagcaatggtaaaatcatcatctggatttaggaattgctcttgtcatacccccaagtttctaagatttaagattctccttactactatcctacgtttaaatatctttgaaagtttgtattaaatgtgaattttaagaaataatatttatatttctgtaaatgtaaactgtgaagatagttataaactgaagcagatacctggaaccacctaaagaacttccatttatggaggatttttttgccccttgtgtttggaattataaaatataggtaaaagtacgtaattaaataatgtttttggtaaaaaaaaaaaaaaaaaaaaaaaaaaaaaaaaaaaaaaaaaaaaaaaaaaaaaaaaaaaaaaaaaaa

SEQ ID NO: 109 - DNA, 2082 bp, Homo sapiens
gacaggtctgtgaagcaggcaggttgctcagctgcccccggagcggttcctccacctgaggcagactccacgtcggctggcatgagccggcgcccctgcagctgcgccctacggccaccccgctgctcctgcagcgccagccccagcgcagtgacagccgccgggcgccctcgaccctcggatagttgtaaagaagaaagttctaccctttctgtcaaaatgaagtgtgattttaattgtaaccatgttcattccggacttaaactggtaaaacctgatgacattggaagactagtttcctacacccctgcatatttggaaggttcctgtaaagactgcattaaagactatgaaaggctgtcatgtattgggtcaccgattgtgagccctaggattgtacaacttgaaactgaaagcaagcgcttgcataacaaggaaaatcaacatgtgcaacagacacttaatagtacaaatgaaatagaagcactagagaccagtagactttatgaagacagtggctattcctcattttctctacaaagtggcctcagtgaacatgaagaaggtagcctcctggaggagaatttcggtgacagtctacaatcctgcctgctacaaatacaaagcccagaccaatatcccaacaaaaacttgctgccagttcttcattttgaaaaagtggtttgttcaacattaaaaaagaatgcaaaacgaaatcctaaagtagatcgggagatgctgaaggaaattatagccagaggaaattttagactgcagaatataattggcagaaaaatgggcctagaatgtgtagatattctcagcgaactctttcgaaggggactcagacatgtcttagcaactattttagcacaactcagtgacatggacttaatcaatgtgtctaaagtgagcacaacttggaagaagatcctagaagatgataagggggcattccagttgtacagtaaagcaatacaaagagttaccgaaaacaacaataaattttcacctcatgcttcaaccagagaatatgttatgttcagaaccccactggcttctgttcagaaatcagcagcccagacttctctcaaaaaagatgctcaaaccaagttatccaatcaaggtgatcagaaaggttctacttatagtcgacacaatgaattctctgaggttgccaagacattgaaaaagaacgaaagcctcaaagcctgtattcgctgtaattcacctgcaaaatatgattgctatttacaacgggcaacctgcaaacgagaaggctgtggatttgattattgtacgaagtgtctctgtaattatcatactactaaagactgttcagatggcaagctcctcaaagccagttgtaaaataggtcccctgcctggtacaaagaaaagcaaaaagaatttacgaagattgtgatctcttattaaatcaattgttactgatcatgaatgttagttagaaaatgttaggttttaacttaaaaaaaattgtattgtgattttcaattttatgttgaaatcggtgtagtatcctgaggtttttttccccccagaagataaagaggatagacaacctcttaaaatatttttacaatttaatgagaaaaagtttaaaattctcaatacaaatcaaacaatttaaatattttaagaaaaaaggaaaagtagatagtgatactgagggtaaaaaaaaaattgattcaattttatggtaaaggaaacccatgcaattttacctagacagtcttaaatatgtctggttttccatctgttagcatttcagacattttatgttcctcttactcaattgataccaacagaaatatcaacttctggagtctattaaatgtgttgtcacctttctaaagctttttttcattgtgtgtatttcccaagaaagtatcctttgtaaaaacttgcttgttttccttatttctgaaatctgttttaatatttttgtatacatgtaaatatttctgtattttttatatgtcaaagaatatgtctcttgtatgtacatataaaaataaattttgctcaataaaattgtaagcttaaaaaaaaaaaaaaaaaa

SEQ ID NO: 110 - DNA, 2265 bp, Homo sapiens
agtcctgcgatttcgggtgtagagggagcaggggcctgcggggacctggtgtgggtggagtggggacaagcggtggagaagggtacgccagggtcgctgagagactctgttctccctggagggactggttgccatgagagcagccgtctgaggggacgcagcctgcactacgcgccccaagaggctgtgcgtggcgagcaggtcacgtgacgggagcgcgggctttggaaggcggctgaacgtcaggccacccgccgctaagctgagaagggagagcgagcttaggaccgcctgcccggggcaaccccgaaccaagctttagccgccgaggccgcgtgtcccaaaggccagtcatccctcctctgtgttgccatgggaattcaaggcctggccaaactaattgctgatgtggcccccagtgccatccgggagaatgacatcaagagctactttggccgtaaggtggccattgatgcctctatgagcatttatcagttcctgattgctgttcgccagggtggggatgtgctgcagaatgaggagggtgagaccaccagccacctgatgggcatgttctaccgcaccattcgcatgatggagaacggcatcaagcccgtgtatgtctttgatggcaagccgccacagctcaagtcaggcgagctggccaaacgcagtgagcggcgggctgaggcagagaagcagctgcagcaggctcaggctgctggggccgagcaggaggtggaaaaattcactaagcggctggtgaaggtcactaagcagcacaatgatgagtgcaaacatctgctgagcctcatgggcatcccttatcttgatgcacccagtgaggcagaggccagctgtgctgccctggtgaaggctggcaaagtctatgctgcggctaccgaggacatggactgcctcaccttcggcagccctgtgctaatgcgacacctgactgccagtgaagccaaaaagctgccaatccaggaattccacctgagccggattctgcaggagctgggcctgaaccaggaacagtttgtggatctgtgcatcctgctaggcagtgactactgtgagagtatccggggtattgggcccaagcgggctgtggacctcatccagaagcacaagagcatcgaggagatcgtgcggcgacttgaccccaacaagtaccctgtgccagaaaattggctccacaaggaggctcaccagctcttcttggaacctgaggtgctggacccagagtctgtggagctgaagtggagcgagccaaatgaagaagagctgatcaagttcatgtgtggtgaaaagcagttctctgaggagcgaatccgcagtggggtcaagaggctgagtaagagccgccaaggcagcacccagggccgcctggatgatttcttcaaggtgaccggctcactctcttcagctaagcgcaaggagccagaacccaagggatccactaagaagaaggcaaagactggggcagcagggaagtttaaaaggggaaaataaatgtgtttccccattatacctccttcaccccagaatatttgccgtcttgtacccttaagagctacagctagagaaaccttcacggggtggagagaggattctaaggcttttctagcgtgacccttttcagtagtgctagtcccttttttacttgatcttaatggcaagaaggccacagaggtacttttccttttttagctcaggaaaatatgtcaggctcaaaccacttctcaggcagtttaatggacactaagtccattgttacatgaaagtgatagatagcaacaagttttggagaagagagagggagataaaagggggagacaaaagatgtacagaaatgatttcctggctggccaactggtggccagtgggaggtgatggtggacctagactgtgcttttctgtcttgttcagccttgacccaccttgagagagagccaccaggaaggcgcatcttagcagatgggaggaactgctgagagaagatgggcagaaagctggagcccctggagttggctgtgtctgtgtttgtgactgattactggctgtgtcttgggtgggcagaaactcgaacttgctatgtaatttgtgtctagttattcagaggagtaagatggtgatgttcacctggcaatcagctgagttgagactttggaataagacactggttttcatgcgctgtttttgttttaaagttatgaagaaaaaagtcaataaaattctaaaagtaaaaaaaaaaaaaaaaaa

SEQ ID NO: 111 - DNA, 3497 bp, Homo sapiens
gtcagtccccgcgcttttcggaggctgccagcgtcccacaccagccgcaggtgaaaaccggcagaaagacattaagagattttcctgcagtcactgctggcagatgatagagccaggatttgaaagcaggcagcctggctccagaccctgtgctcttaactcccgttttgcatcaagaacagaatcctatgaaaggcttgtacagtgcttggatagcagcatcaaggagcattgtgtacatgcagaagtgcacagtacctggagtgaaactgcttgtgttcgatttctgataccattcataactggctgtgtgatctcaaaacctctaaaatgcagacctccagctctagatctgtgcacctgagtgaatggcagaagaattacttcgcaattacatctggcatatgtaccggaccgaaggcagatgcataccgtgcacagatattacgcattcagtatgcatgggcaaactctgagatttcccaggtctgtgctaccaaactgttcaaaaaatatgcagagaaatattctgcaattattgattctgacaatgttgaatctgggttgaataattatgcagaaaacattttaactttggcaggatctcaacaaacagatagtgacaagtggcagtctggattgtcaataaataatgttttcaaaatgagtagtgtacagaagatgatgcaagctggcaaaaaattcaaagactctctgttggaacctgctcttgcatcagtggtaatccataaggaggccactgtctttgatcttcctaaatttagtgtttgtggtagttctcaagagagtgactcattacctaactcagctcatgatcgagaccggacccaagacttcccggagagcaatcgtttgaaactccttcagaatgcccagccacctatggtgactaacactgctaggacttgtcctacattctcagcacctgtaggtgagtcagctactgcaaaattccatgtcacaccattgtttggaaatgtcaaaaaggaaaatcacagctctgcaaaagaaaacataggacttaatgtgttcttatctaaccagtcttgttttcctgctgcctgtgaaaatccacagaggaagtctttttatggttctggcaccattgatgcactttccaatccaatactgaataaggcttgtagtaaaacagaagataatggcccaaaggaggatagcagcctgcctacatttaaaactgcaaaagaacaattatgggtagatcagcaaaaaaagtaccaccaacctcagcgtgcatcagggtcttcatatggtggtgtaaaaaagtctctaggagctagtagatcccgagggatacttggaaagtttgttcctcctatacccaagcaagatgggggagagcagaatggaggaatgcaatgtaagccttatggggcaggacctacagaaccagcacatccagttgatgagcgtctgaagaacttggagccaaagatgattgaacttattatgaatgagattatggatcatggacctccagtaaattgggaagatattgcaggagtagaatttgctaaagccaccataaaggaaatagttgtgtggcccatgttgaggccagacatctttactggtttaaggggaccccctaaaggaattttgctctttggtcctcctgggactggtaaaactctaattggcaagtgcattgctagtcagtctggggcaacattctttagcatctctgcttcatccttaacttctaaatgggtaggtgagggggagaaaatggtccgtgcattgtttgctgttgcaaggtgtcagcaaccagctgtgatatttattgacgaaattgattccttgttatctcaacggggagatggtgagcatgaatcttctagaaggataaaaacagaatttttagttcaattagatggagcaacaacatcttctgaagatcgtatcctagtggtgggagcaacaaatcggccacaagaaattgatgaggctgcccggagaagattggtgaaaaggctttatattcccctcccagaagcttcagccaggaaacagatagtaattaatctaatgtccaaagagcagtgttgcctcagtgaagaagaaattgaacagattgtacagcagtctgatgcgttttcaggagcagacatgacacagctttgcagggaggcttctcttggtcctattcgcagtttacaaactgctgacattgctaccataacaccggatcaagttcgacccatagcttacattgattttgaaaatgcttttagaactgtgcgacctagtgtttctccaaaagatttagagctttatgaaaactggaacaaaacttttggttgtggaaagtaagtgggatacttggaatcaaggcatctctgtattacagtcttctttattttttagcatagaaagttggggatgtgttaattgtatttttaagaatatattctaaattctgtacttcaaataatagcacagattttacatctgattgacatagtgtatgttaatgtaagttttgctttccagtgattacctgatacgtaagcctatttgaacaaagtgagaatgaacttttgtttctaagaagtctttatcttgaagctatataacatgaaaagtgagctcaaattttttttagttgaagattacatataaagttgtgtctgattaatattcatcttttattgaagaaagtgccttctgatggccacataattcttaatgtcagctagtataatggtttacatttggacaaagtattgcttagtgttatttaagtagatttaagatctcaaagctaaagtgccaatttttactttcttcagccaatttgttacctcttttatggtttttaatttttatcaggactaacattttcagaaatagcaaggtgtgatctagtattagattcacagaactgaaaggttaattaagaatgttggttattttcacgggagcgtgtgatatttaacattaatattttatttgacactacagcctgtaatactgctctctttcaaaagcaagttttcagatttttataacagacccattttgttttatgaaacatgttcattacagaaacatgagaaaatagagataagtaaaaagaataaaagtcactattatcctaccactttgcgggacacactattaatatttaagcatagattcttccagatgttttgttttatacagcagtaggattgtgtaatgtattctctcttgtagcctattcttcaaagcgtatcttcactttccatgttaacataaatgtccttttatgattgtctaggattccatggatggatggaatataattgagtcatctggtagagcgcatataggacaggacgctaggttgtttatcttttgtttattgtaaaggaactatgtgggatgcatttggtgatctttttaaaaaatgtataaatttcttgagtaattcctggattaaagaatatgcactttttaaaaaaaaaaaaaaa

SEQ ID NO: 112 - DNA, 2084 bp, Homo sapiens
aaccgcatctgcagcgagcaactgagaagccaagactgagccggcggccgcggcgcagcgaacgagcagtgaccgtgctcctacccagctctgcttcacagcgcccacctgtctccgcccctcggcccctcgcccggctttgcctaaccgccacgatgatgttctcgggcttcaacgcagactacgaggcgtcatcctcccgctgcagcagcgcgtccccggccggggatagcctctcttactaccactcacccgcagactccttctccagcatgggctcgcctgtcaacgcgcaggacttctgcacggacctggccgtctccagtgccaacttcattcccacggtcactgccatctcgaccagtccggacctgcagtggctggtgcagcccgccctcgtctcctctgtggccccatcgcagaccagagcccctcaccctttcggagtccccgccccctccgctggggcttactccagggctggcgttgtgaagaccatgacaggaggccgagcgcagagcattggcaggaggggcaaggtggaacagttatctccagaagaagaagagaaaaggagaatccgaagggaaaggaataagatggctgcagccaaatgccgcaaccggaggagggagctgactgatacactccaagcggagacagaccaactagaagatgagaagtctgctttgcagaccgagattgccaacctgctgaaggagaaggaaaaactagagttcatcctggcagctcaccgacctgcctgcaagatccctgatgacctgggcttcccagaagagatgtctgtggcttcccttgatctgactgggggcctgccagaggttgccaccccggagtctgaggaggccttcaccctgcctctcctcaatgaccctgagcccaagccctcagtggaacctgtcaagagcatcagcagcatggagctgaagaccgagccctttgatgacttcctgttcccagcatcatccaggcccagtggctctgagacagcccgctccgtgccagacatggacctatctgggtccttctatgcagcagactgggagcctctgcacagtggctccctggggatggggcccatggccacagagctggagcccctgtgcactccggtggtcacctgtactcccagctgcactgcttacacgtcttccttcgtcttcacctaccccgaggctgactccttccccagctgtgcagctgcccaccgcaagggcagcagcagcaatgagccttcctctgactcgctcagctcacccacgctgctggccctgtgagggggcagggaaggggaggcagccggcacccacaagtgccactgcccgagctggtgcattacagagaggagaaacacatcttccctagagggttcctgtagacctagggaggaccttatctgtgcgtgaaacacaccaggctgtgggcctcaaggacttgaaagcatccatgtgtggactcaagtccttacctcttccggagatgtagcaaaacgcatggagtgtgtattgttcccagtgacacttcagagagctggtagttagtagcatgttgagccaggcctgggtctgtgtctcttttctctttctccttagtcttctcatagcattaactaatctattgggttcattattggaattaacctggtgctggatattttcaaattgtatctagtgcagctgattttaacaataactactgtgttcctggcaatagtgtgttctgattagaaatgaccaatattatactaagaaaagatacgactttattttctggtagatagaaataaatagctatatccatgtactgtagtttttcttcaacatcaatgttcattgtaatgttactgatcatgcattgttgaggtggtctgaatgttctgacattaacagttttccatgaaaacgttttattgtgtttttaatttatttattaagatggattctcagatatttatatttttattttatttttttctaccttgaggtcttttgacatgtggaaagtgaatttgaatgaaaaatttaagcattgtttgcttattgttccaagacattgtcaataaa

SEQ ID NO: 113 - DNA, 1631 bp, Homo sapiens
ctggccacaccctccgcctggacgcagcagccaccgccgcgtccctctctccacgaggctgccggcttaggacccccagctccgacgtaagtccctctcgcgcgccacctccatccgctgcccctctgcccacgggccgggctcaggtgggtaggggtttgaccccttccgctcctctccgccccccatccacgcccacatctctctgcctcctctcctgggctacagtgggccgctctgcctcgctcccgcccgcctgcctcagtctccccagctctctgccacccccctcggaccagtgcctcttaggtctctccagcgcgccatccctgcaaggcggcccctgacaccaactcactttttcctctgagcgcgggaggcgttactcactcttcctccttcccctcctcgccgactcccgggctctgggcccctgggggagggaagaggcctcctatctactcctctgccccagtcccctccttgcgtcagtcccagtgagggataagcgcctggcggaaggcgcagggaggtgtttctctgcttcaggagtgcccgccggcccttgcagctgctggaagacccatttatctcatgcttcttgttttctttggggacctgcaggggaaggaagcagggtgacggtttggtatccccacctaagaccctcccctttcccctgaggccagccgtcagcccctggcagggggtcttggaagccagaggtttttgctcagggcagggaaagggctgcaggatccccgggggctgccggaggtcggtctcactgacatcatggctgaccccagcatcgcctggtcccacagatgtcgccctctggtcgcctgtgtcttctcaccatcgttggcctgattctccccaccagaggacagacgttgaaagataccacgtccagttcttcagcagactcaactatcatggacattcaggtcccgacacgagccccagatgcagtctacacagaactccagcccacctctccaaccccaacctggcctgctgatgaaacaccacaaccccagacccagacccagcaactggaaggaacggatgggcctctagtgacagatccagagacacacaagagcaccaaagcagctcatcccactgatgacaccacgacgctctctgagagaccatccccaagcacagacgtccagacagacccccagaccctcaagccatctggttttcatgaggatgaccccttcttctatgatgaacacaccctccggaaacgggggctgttggtcgcagctgtgctgttcatcacaggcatcatcatcctcaccagtggcaagtgcaggcagctgtcccggttatgccggaatcgttgcaggtgagtccatcagaaacaggagctgacaacctgctgggcacccgaagaccaagccccctgccagctcaccgtgcccagcctcctgcatcccctcgaagagcctggccagagagggaagacacagatgatgaagctggagccagggctgccggtccgagtctcctacctcccccaaccctgcccgcccctgaaggctacctggcgccttgggggctgtccctcaagttatctcctctgctaagacaaaaagtaaagcactgtggtctttgcc

SEQ ID NO: 114 - DNA, 1355 bp, Homo sapiens
cagtggctggtaggcagtggctgggaggcagcggcccaattagtgtcgtgcggcccgtggcgaggcgaggtccggggagcgagcgagcaagcaaggcgggaggggtggccggagctgcggcggctggcacaggaggaggagcccgggcgggcgaggggcggccggagagcgccagggcctgagctgccggagcggcgcctgtgagtgagtgcagaaagcaggcgcccgcgcgctagccgtggcaggagcagcccgcacgccgcgctctctccctgggcgacctgcagtttgcaatatgactttggaggaattctcggctggagagcagaagaccgaaaggatggataaggtgggggatgccctggaggaagtgctcagcaaagccctgagtcagcgcacgatcactgtcggggtgtacgaagcggccaagctgctcaacgtcgaccccgataacgtggtgttgtgcctgctggcggcggacgaggacgacgacagagatgtggctctgcagatccacttcaccctgatccaggcgttttgctgcgagaacgacatcaacatcctgcgcgtcagcaacccgggccggctggcggagctcctgctcttggagaccgacgctggccccgcggcgagcgagggcgccgagcagcccccggacctgcactgcgtgctggtgacgaatccacattcatctcaatggaaggatcctgccttaagtcaacttatttgtttttgccgggaaagtcgctacatggatcaatgggttccagtgattaatctccctgaacggtgatggcatctgaatgaaaataactgaaccaaattgcactgaagtttttgaaatacctttgtagttactcaagcagttactccctacactgatgcaaggattacagaaactgatgccaaggggctgagtgagttcaactacatgttctgggggcccggagatagatgactttgcagatggaaagaggtgaaaatgaagaaggaagctgtgttgaaacagaaaaataagtcaaaaggaacaaaaattacaaagaaccatgcaggaaggaaaactatgtattaatttagaatggttgagttacattaaaataaaccaaatatgttaaagtttaagtgtgcagccatagtttgggtatttttggtttatatgccctcaagtaaaagaaaagccgaaagggttaatcatatttgaaaaccatattttattgtattttgatgagatattaaattctcaaagttttattataaattctactaagttattttatgacatgaaaagttatttatgctataaattttttgaaacacaatacctacaataaactggtatgaataattgcatcatt

SEQ ID NO: 115 - DNA, 2330 bp, Homo sapiens
gaattcggcacgagcgacgcggcccagaggccaggaacattccgcgcgtggaccagccgggccagggcgatgctgcgggtgcggtgtctgcgcggcgggagccgcggcgccgaggcggtgcactacatcggatctcggcttggacgaaccttgacaggatgggtgcagcgaactttccagagcacccaggcagctacggcttcctcccggaactcctgtgcagctgacgacaaagccactgagcctctgcccaaggactgccctgtctcttcttacaacgaatgggaccccttagaggaagtgatagtgggcagagcagaaaacgcctgtgttccaccgttcaccatcgaggtgaaggccaacacatatgaaaagtactggccattttaccagaagcaaggagggcattattttcccaaagatcatttgaaaaaggctgttgctgaaattgaagaaatgtgcaatattttaaaaacggaaggagtgacagtaaggaggcctgaccccattgactggtcattgaagtataaaactcctgattttgagtctacgggtttatacagtgcaatgcctcgagacatcctgatagttgtgggcaatgagattatcgaggctcccatggcatggcgttcacgcttctttgagtaccgagcgtacaggtcaattatcaaagactacttccaccgtggcgccaagtggacaacagctcctaagcccacaatggctgatgagctttataaccaggattatcccatccactctgtagaagacagacacaaattggctgctcagggaaaatttgtgacaactgagtttgagccatgctttgatgctgctgacttcattcgagctggaagagatatttttgcacagagaagccaggttacaaactacctaggcattgaatggatgcgtaggcatcttgctccagactacagagtgcatatcatctcctttaaagatcccaatcccatgcatattgatgctaccttcaacatcattggacctggtattgtgctttccaaccctgaccgaccatgtcaccagattgatcttttcaagaaagcaggatggactatcattactcctccaacaccaatcatcccagacgatcatccactctggatgtcatccaaatggctttccatgaatgtcttaatgctagatgaaaaacgtgttatggtggatgccaatgaagttccaattcaaaagatgtttgaaaagctgggtatcactaccattaaagttaacattcgtaatgccaattccctgggaggaggcttccattgctggacctgcgatgtccggcgccgaggcaccctacagtcctacttggactgaacaggcctgatggagcttgtggctggcctcagatacacctaagaagcttaggggcaaggttcattctcctgctttaaaaagtgcatgaactgtagtgctttaaacaatcatctccttaacaggggtcgtaagcctggtttgcttctattacttttctttgacataaagaaaataacttctgctaggtattactctctactcctaaagttatttactatttggcttcaagtataaaattttggtgaatgtgtaccaagaaaaaattagtcacctgagtaacttggccactaataattaaccatctacctctgtttttaattttctttccaaaaggcagcttgaaatgttggtcctaatcttaattttttttcctcttctatagacttgagaatgtttttctctaaatgagagaaagacttagaatgtacacagatccaaaatagaatcagattatctctttttttctaaaggagagaaagacttagaacatacacagatcctaagtagaaccaggtaattgtctctttttctaataaggaatttgggtaatttttaattttttgttttttaaaaaataacctagactatgcaaaacatcaaagtgaattttccatgaatgtttttaatattctcatctcaacattgtgatatatgctactaaaaaccttttcatatacatcttacctcatttcaagtgaattattttaatctttttctctctttccaaaaatttacaggaatgtttagtgtaattggatttcgctatcagttcccatccttaagttttgatattcaatatctgatagatacactgcatctttggtcatctaagatttgtttacaaatgtgcaaattatttagagcatagactttataagcattaaaaaaaactaatggaggtaaaacctaaatgcgatgtgaaataattttagtgttgatactgtatgtgtatttttattctaataaacttttgtgttccagattgaaaa

SEQ ID NO: 116 - DNA, 4370 bp, Homo sapiens
ccgcgctctctgatcagaggcgaagctcggaggtcctacaggtatggatctctggcagctgctgttgaccttggcactggcaggatcaagtgatgctttttctggaagtgaggccacagcagctatccttagcagagcaccctggagtctgcaaagtgttaatccaggcctaaagacaaattcttctaaggagcctaaattcaccaagtgccgttcacctgagcgagagactttttcatgccactggacagatgaggttcatcatggtacaaagaacctaggacccatacagctgttctataccagaaggaacactcaagaatggactcaagaatggaaagaatgccctgattatgtttctgctggggaaaacagctgttactttaattcatcgtttacctccatctggataccttattgtatcaagctaactagcaatggtggtacagtggatgaaaagtgtttctctgttgatgaaatagtgcaaccagatccacccattgccctcaactggactttactgaacgtcagtttaactgggattcatgcagatatccaagtgagatgggaagcaccacgcaatgcagatattcagaaaggatggatggttctggagtatgaacttcaatacaaagaagtaaatgaaactaaatggaaaatgatggaccctatattgacaacatcagttccagtgtactcattgaaagtggataaggaatatgaagtgcgtgtgagatccaaacaacgaaactctggaaattatggcgagttcagtgaggtgctctatgtaacacttcctcagatgagccaatttacatgtgaagaagatttctactttccatggctcttaattattatctttggaatatttgggctaacagtgatgctatttgtattcttattttctaaacagcaaaggattaaaatgctgattctgcccccagttccagttccaaagattaaaggaatcgatccagatctcctcaaggaaggaaaattagaggaggtgaacacaatcttagccattcatgatagctataaacccgaattccacagtgatgactcttgggttgaatttattgagctagatattgatgagccagatgaaaagactgaggaatcagacacagacagacttctaagcagtgaccatgagaaatcacatagtaacctaggggtgaaggatggcgactctggacgtaccagctgttgtgaacctgacattctggagactgatttcaatgccaatgacatacatgagggtacctcagaggttgctcagccacagaggttaaaaggggaagcagatctcttatgccttgaccagaagaatcaaaataactcaccttatcatgatgcttgccctgctactcagcagcccagtgttatccaagcagagaaaaacaaaccacaaccacttcctactgaaggagctgagtcaactcaccaagctgcccatattcagctaagcaatccaagttcactgtcaaacatcgacttttatgcccaggtgagcgacattacaccagcaggtagtgtggtcctttccccgggccaaaagaataaggcagggatgtcccaatgtgacatgcacccggaaatggtctcactctgccaagaaaacttccttatggacaatgcctacttctgtgaggcagatgccaaaaagtgcatccctgtggctcctcacatcaaggttgaatcacacatacagccaagcttaaaccaagaggacatttacatcaccacagaaagccttaccactgctgctgggaggcctgggacaggagaacatgttccaggttctgagatgcctgtcccagactatacctccattcatatagtacagtccccacagggcctcatactcaatgcgactgccttgcccttgcctgacaaagagtttctctcatcatgtggctatgtgagcacagaccaactgaacaaaatcatgccttagcctttctttggtttcccaagagctacgtatttaatagcaaagaattgactggggcaataacgtttaagccaaaacaatgtttaaaccttttttgggggagtgacaggatggggtatggattctaaaatgccttttcccaaaatgttgaaatatgatgttaaaaaaataagaagaatgcttaatcagatagatattcctattgtgcaatgtaaatattttaaagaattgtgtcagactgtttagtagcagtgattgtcttaatattgtgggtgttaatttttgatactaagcattgaatggctatgtttttaatgtatagtaaatcacgctttttgaaaaagcgaaaaaatcaggtggcttttgcggttcaggaaaattgaatgcaaaccatagcacaggctaattttttgttgtttcttaaataagaaacttttttatttaaaaaactaaaaactagaggtgagaaatttaaactataagcaagaaggcaaaaatagtttggatatgtaaaacatttattttgacataaagttgataaagattttttaataatttagacttcaagcatggctattttatattacactacacactgtgtactgcagttggtatgacccctctaaggagtgtagcaactacagtctaaagctggtttaatgttttggccaatgcacctaaagaaaaacaaactcgttttttacaaagcccttttatacctccccagactccttcaacaattctaaaatgattgtagtaatctgcattattggaatataattgttttatctgaatttttaaacaagtatttgttaatttagaaaactttaaagcgtttgcacagatcaacttaccaggcaccaaaagaagtaaaagcaaaaaagaaaacctttcttcaccaaatcttggttgatgccaaaaaaaaatacatgctaagagaagtagaaatcatagctggttcacactgaccaagatacttaagtgctgcaattgcacgcggagtgagttttttagtgcgtgcagatggtgagagataagatctatagcctctgcagcggaatctgttcacacccaacttggttttgctacataattatccaggaagggaataaggtacaagaagcattttgtaagttgaagcaaatcgaatgaaattaactgggtaatgaaacaaagagttcaagaaataagtttttgtttcacagcctataaccagacacatactcatttttcatgataatgaacagaacatagacagaagaaacaaggttttcagtccccacagataactgaaaattatttaaaccgctaaaagaaactttctttctcactaaatcttttataggatttatttaaaatagcaaaagaagaagtttcatcattttttacttcctctctgagtggactggcctcaaagcaagcattcagaagaaaaagaagcaacctcagtaatttagaaatcattttgcaatcccttaatatcctaaacatcattcatttttgttgttgttgttgttgttgagacagagtctcgctctgtcgccaggctagagtgcggtggcgcgatcttgactcactgcaatctccacctcccacaggttcaggcgattcccgtgcctcagcctcctgagtagctgggactacaggcacgcaccaccatgccaggctaatttttttgtattttagcagagacggggtttcaccatgttggccaggatggtctcgatctcctgacctcgtgatccacccgactcggcctcccaaagtgctgggattacaggtgtaagccaccgtgcccagccctaaacatcattcttgagagcattgggatatctcctgaaaaggtttatgaaaaagaagaatctcatctcagtgaagaatacttctcattttttaaaaaagcttaaaactttgaagttagctttaacttaaatagtatttcccatttatcgcagaccttttttaggaagcaagcttaatggctgataattttaaattctctctcttgcaggaaggactatgaaaagctagaattgagtgtttaaagttcaacatgttatttgtaatagatgtttgatagattttctgctactttgctgctatggttttctccaagagctacataatttagtttcatataaagtatcatcagtgtagaacctaattcaattcaaagctgtgtgtttggaagactatcttactatttcacaacagcctgacaacatttctatagccaaaaatagctaaatacctcaatcagtctcagaatgtcattttggtactttggtggccacataagccattattcactagtatgactagttgtgtctggcagtttatatttaactctctttatgtctgtggattttttccttcaaagtttaataaatttattttcttggaaaaaaaaaaa

SEQ ID NO: 117 - DNA, 2188 bp, Homo sapiens
agggggtgccggcggggctgcagcggaggcactttggaagaatgactctggagtccatcatggcgtgctgcctgagcgaggaggccaaggaagcccggcggatcaacgacgagatcgagcggcagctccgcagggacaagcgggacgcccgccgggagctcaagctgctgctgctcgggacaggagagagtggcaagagtacgtttatcaagcagatgagaatcatccatgggtcaggatactctgatgaagataaaaggggcttcaccaagctggtgtatcagaacatcttcacggccatgcaggccatgatcagagccatggacacactcaagatcccatacaagtatgagcacaataaggctcatgcacaattagttcgagaagttgatgtggagaaggtgtctgcttttgagaatccatatgtagatgcaataaagagtttatggaatgatcctggaatccaggaatgctatgatagacgacgagaatatcaattatctgactctaccaaatactatcttaatgacttggaccgcgtagctgaccctgcctacctgcctacgcaacaagatgtgcttagagttcgagtccccaccacagggatcatcgaatacccctttgacttacaaagtgtcattttcagaatggtcgatgtagggggccaaaggtcagagagaagaaaatggatacactgctttgaaaatgtcacctctatcatgtttctagtagcgcttagtgaatatgatcaagttctcgtggagtcagacaatgagaaccgaatggaggaaagcaaggctctctttagaacaattatcacatacccctggttccagaactcctcggttattctgttcttaaacaagaaagatcttctagaggagaaaatcatgtattcccatctagtcgactacttcccagaatatgatggaccccagagagatgcccaggcagcccgagaattcattctgaagatgttcgtggacctgaacccagacagtgacaaaattatctactcccacttcacgtgcgccacagacaccgagaatatccgctttgtctttgctgccgtcaaggacaccatcctccagttgaacctgaaggagtacaatctggtctaattgtgcctcctagacacccgccctgcccttccctggtgggctattgaagatacacaagagggactgtatttctgtggaaaacaatttgcataatactaatttattgccgtcctggactctgtgtgagcgtgtccacagagtttgtagtaaatattatgattttatttaaactattcagaggaaaaacagaggatgctgaagtacagtcccagcacatttcctctctatcttttttttaggcaaaaccttgtgactcagtgtattttaaattctcagtcatgcactcacaaagataagacttgtttctttctgtctctctctctttttcttttctatggagcaaaacaaagctgatttcccttttttcttcccccgctaattcatacctccctcctgatgtttttcccaggttacaatggcctttatcctagttccattcttggtcaagtttttctctcaaatgatacagtcaggacacatcgttcgatttaagccatcatcagcttaatttaagtttgtagtttttgctgaaggattatatgtattaatacttacggttttaaatgtgttgctttggatacacacatagtttcttttttaatagaatatactgtcttgtctcactttggactgggacagtggatgcccatctaaaagttaagtgtcatttcttttagatgtttaccttcagccatagcttgattgctcagagaaatatgcagaaggcaggatcaaagacacacaggagtcctttcttttgaaatgccacgtgccattgtctttcctcccttctttgcttctttttcttaccctctctttcaattgcagatgccaaaaaagatgccaacagacactacattaccctaatggctgctacccagaacctttttataggttgttcttaatttttttgttgttgttgttcaagcttttcctttcttttttttcttagtgtttgggccacgattttaaaatgacttttattatgggtatgtgttgccaaagctggctttttgtcaaataaaatgaatacgaacttaaaaaataaaaaaaaaaaaaaaaaaaaa

SEQ ID NO: 118 - DNA, 6948 bp, Homo sapiens
ccaagtacctagggtggtggccgagtcccgcctcccgccagcgggggcgaggacctgcgacgcgcacccctgcctggcccggtctcctcagcaccagccccacgcacaccctacttcctcagcttctcgccctcaccctgccaacttccctgcgaggagggacctgccgccagcctgcttcctcgtccgcaggccctgcgctgaacgctgccgcgcccagggttcaccttgcgccgtcgggaaagcccatgaactctccagaaacggcgtaaaggagggtcccgccgcggcgcagggctggggcgcctgggttccccctgggtggagcagcggcagcagagcgggaaagtggtggaggatgatcttgcggccaaaggggacctcggcgcagtaatgtcaacatgatgtttcgctcagatcgaatgtggagctgccattggaaatggaagcccagtcctctcctgttcttatttgctttatatatcatgtgtgttcctcactcagtgtggggatgtgccaactgccgagtggttttgtccaacccttctgggacctttacttctccatgctaccctaacgactacccaaacagccaggcttgcatgtggacgctccgagcccccaccggttatatcattcagataacatttaacgactttgacattgaagaagctcccaattgcatttatgactcattatcccttgataatggagagagccagactaaattttgtggagcaactgccaaaggcctatcatttaactcaagtgcgaatgagatgcatgtgtccttttcaagtgactttagcatccagaagaaaggtttcaatgccagctacatcagagttgccgtgtccttaaggaatcaaaaggtcattttaccccagacatcagatgcttaccaggtatctgttgcaaaaagcatctctattccagagctcagtgctttcacactctgctttgaagcaaccaaagttggccatgaagacagtgattggacagctttctcctactcaaatgcatccttcacacaattgctcagttttggaaaggccaagagtggctactttctatccatttctgattcaaaatgtttgttgaataatgcattacctgtcaaagaaaaagaagacatttttgcagaaagctttgaacagctctgccttgtttggaataattctttgggctctattggtgtaaatttcaaaagaaactatgaaacagttccatgtgattctaccattagtaaagttattcctgggaatgggaaattgttgttgggctccaatcaaaatgaaattgtctctctaaaaggggacatttataactttcgactttggaattttaccatgaatgccaaaatcctctccaacctcagctgtaatgtgaaagggaatgtagtcgactggcaaaatgacttctggaatatcccaaacctagctctgaaagctgaaagcaacctaagctgtggttcctacctgatcccgctcccagcagcagaactggccagctgtgcagacctggggaccctctgtcaagctactgtaaactctcctagtactacaccacccactgtcaccactaacatgcctgttactaacagaatcgataaacaaaggaatgatggaattatctatagaatatccgtagtgattcagaacatccttcgtcaccctgaggtaaaagtacagagcaaggtggcagaatggctcaattcaaccttccaaaattggaactacacggtttatgtcgttaatatcagttttcacctgagtgctggagaggacaagattaaagtcaagagaagccttgaggatgagccaaggttggtgctttgggcccttctagtttacaatgctaccaacaatactaatttagaaggaaaaatcattcagcagaagctcctaaaaaataatgagtccttggatgaaggcttgaggctacatacagtgaatgtgagacaactgggtcattgtcttgccatggaggaacccaaaggctactactggccatctatccaaccttctgaatacgttcttccttgtccagacaagcctggcttttctgcttctcggatatgtttttacaatgctaccaacccattggtaacctactggggacctgttgatatctccaactgtttaaaagaagcaaatgaagttgctaaccagattttaaatttaactgctgatgggcagaacttaacctcagccaatattaccaacattgtggaacaggtcaaaagaattgtgaataaagaagaaaacattgatataacacttggctcaactctaatgaatatattttctaatatcttaagcagttcagacagtgacttgcttgagtcatcttctgaagctttaaaaacaattgatgaattggccttcaagatagacctaaatagcacatcacatgtgaatattacaactcggaacttggctctcagcgtatcatccctgttaccagggacaaatgcaatttcaaattttagcattggtcttccaagcaataatgaatcgtatttccagatggattttgagagtggacaagtggatccactggcatctgtaattttgcctccaaacttacttgagaatttaagtccagaagattctgtattagttagaagagcacagtttactttcttcaacaaaactggacttttccaggatgtaggaccccaaagaaaaactttagtgagttatgtgatggcgtgcagtattggaaacattactatccagaatctgaaggatcctgttcaaataaaaatcaaacatacaagaactcaggaagtgcatcatcccatctgtgccttctgggatctgaacaaaaacaaaagttttggaggatggaacacgtcaggatgtgttgcacacagagattcagatgcaagtgagacagtctgcctgtgtaaccacttcacacactttggagttctgatggaccttccaagaagtgcctcacagttagatgcaagaaacactaaagtcctcactttcatcagctatattgggtgtggaatatctgctattttttcagcagcaactctcctgacatatgttgcttttgagaaattgcgaagggattatccctccaaaatcttgatgaacctgagcacagccctgctgttcctgaatctcctcttcctcctagatggctggatcacctccttcaatgtggatggactttgcattgctgttgcagtcctgttgcatttcttccttctggcaacctttacctggatggggctagaagcaattcacatgtacattgctctagttaaagtatttaacacttacattcgccgatacattctaaaattctgcatcattggctggggtttgcctgccttagtggtgtcagttgttctagcgagcagaaacaacaatgaagtctatggaaaagaaagttatgggaaagaaaaaggtgatgaattctgttggattcaagatccagtcatattttatgtgacctgtgctgggtattttggagtcatgttttttctgaacattgccatgttcattgtggtaatggtgcagatctgtgggaggaatggcaagagaagcaaccggaccctgagagaagaagtgttaaggaacctgcgcagtgtggttagcttgacctttctgttgggcatgacatggggttttgcattctttgcctggggacccttaaatatccccttcatgtacctcttctccatcttcaattcattacaaggcttatttatattcatcttccactgtgctatgaaggagaatgttcagaaacagtggcggcggcatctctgctgtggtagatttcggttagcagataactcagattggagtaagacagctaccaatatcatcaagaaaagttctgataatctaggaaaatctttgtcttcaagctccattggttccaactcaacctatcttacatccaaatctaaatccagctctaccacctatttcaaaaggaatagccacacagataatgtctcctatgagcattccttcaacaaaagtggatcactcagacagtgcttccatggacaagtccttgtcaaaactggcccatgctgatggagatcaaacatcaatcatccctgtccatcaggtcattgataaggtcaagggttattgcaatgctcattcagacaacttctataaaaatattatcatgtcagacaccttcagccacagcacaaagttttaatgtctttaagaaaaagaaatcaatctgcagaaatgtgaagatttgcaagcagtgtaaactgcaactagtgatgtaaatgtgctattacctaggtaactgcatatatataaggaatgtattttgttaagaaggcttttgtgaaattcagaatttttctttttaatatatttcttccatggaagagttgtcatcactaaaacttcagtactgagagtaacatgactcagtagccacagaagctatgatttgtaaaatatataattgaatcagagtaatcataatgcaggggagacattcaaattagagacaagggagaagcaatgctgaggaagaccctagatagagctcattttactccacctaatcgttatatctggatatacccattttctgcatcttctttctcaacaataaaaaatgtaactattttgaatgcccacaaatcccattccagtgttactttctgtgaatgcagtaccatattctcattttcaatgacatttcaaccacaggcagaaaagactgtttactccttgacccaaagattaaaaaggattttttattattttaaatattacaccttcagaaccataacatgcttaagaaaactttcccaaaatgttgacctagttaaatgaggctatataaatttctaatattttacttattctattcaaggcatagggccaaagcattaagtataatttaatcccatacattcgagttaagtttagtgttgatgttccatcattctggacctcccaggagttgtttaagaatgaatctcttacacctctacttttgcccctctactgtatattaagcccataggcttgtgggaggaaggagaatttccattaggcaagctgtatgcagtggaattttccttttaggagacacacaattaagactctctggttctgtccttgctttggagactttaagacatttcctaaagcacaaataaaagcctcgtatttccccattgagagttttgttccaaggaatatgaagtgagacatatgggtgagtcataataatcaaaataatttatgaagagctgggtctgcaatagctagtctaaaaactacttgtgtgtcagtcctctggttatagtatataagagcctgaggaggtctggcaagatagatggtgtattatttatggatcaggctgctgcatacaaaccttgcatactattatgcagcttacctaactctcagactattctgagtaatgcttgcttgctaatgaatgtataggagaccacattgtaattgttcttagatgatggagtccatgcagtttcttagaaatcggtctcagtgcatgctgtgctttttcacatttgctctgggttatctgggaagtatcaggttctgggaggcaacagcattaagtgataagaaaaggagacattctggcaaagccaatctgcttaaaggcaaagtccagaacctggaacctagaggcctttctctctgcacgaaaaacaggtagtttgcagtctgagatatgggagagcttttaggctacacagcaacccaagggacctctcaccttttgctgagcttcaatcaggaagctatttgcctggctccagcagatgatgagataatgaggtagtgggttttttattactgttccattttgcaacatcctgcaacaccatcctgggagacaagagcattacccagcttggctttcacgggggagggttgtattcagtaaaaaagaatagtaaatataaggtcactgagattctaagtaagatagtaaatctaaggtcactgagccaaatccttttcaataggcatatattaacaggctgcttattttggcggaggttacatatggatgaaaatgaatcttagtcactgaatattcatatacatttcccccaaaaccttagacattcatagtagattttaattagttagctttctaactagtcagatttctgcccaaagtgcttagtcaatagtaattaagatataggtaattaagatatagcttcaaaaatggctttgcttttgatttctactcatattcgtatggctccagaaaaatatttttttcatatttgacaatgtcagctccactttagaaattttcaataaccagatgagaaaaaaattaagaaattgctcaagggaaacatttgtaaatggatttgaaagattgagccaaattctgttgtcagttctaagcatgcagttctcacctccatttagtcccccatcagaacagaggtcaggaatttagctggggagcctaaatttagttcagcttacctttgagaatagcatcaattcagactctcttttcattatgttttcttttctttttccctctttttaaactacattgtgttagagtcatagtctaggatcctgagagattttccattcttgtcaccattcacttgcattgtaaagattttctttgtctgttgttggcatagattcttttgtacatatttatttatttgtgtttatatatgtcaattggtttcctttcttagcttgatattgcctagctttgttgttttaattaactttctattagagagactgtatatattttttctaaatactttgtgaaatcatttttggtagcaatatctttgaatatgatgaataaaagtgactgtgagtgcaaatagaattagcagtaagaagctactctagctaatttgccattttacttaaatggaaaatgtttttcaaataaatacttatgttgttc

SEQ ID NO: 119 - DNA, 9117 bp, Homo sapiens
tgaggcctgaggcctggggcggggtggcggccgggctggccttggcctcgcgccttcccctgcggccgccgcgggctccgcgggcggtatcggagtgtcgtgcggcgcgtggccgcgtgacacgcgcacttgtcggagtgacgggccctgcggaagaggaggtgcggcccagggcgcaggggagccctcgggagcgggcccggccctcagcgccgccccggccgtgtcccggaggagcggcctgcgccgccgcgcgagaggaagcacccaggcatgtggaatatgctcatagtggcgatgtgcttggcccttctgggctgcctgcaagcccaggagctccagggacatgtctccataatcctgctgggagcaactggggacctggctaagaagtacttatggcagggactgttccagctgtacctggatgaagcggggaggggtcacagttttagcttccatggagctgctctgacagcccccaagcagggtcaagagctcatggccaaggccctggaatccctctcctgccccaaggacatggcacccagtcactgtgcagagcacaaggatcagttcctgcagctgagccagtaccgccaactgaagacggccgaggactatcaggccctgaacaaggacatcgaggcacagctccagcacgcaggcctccgggaggctggcaggatcttctacttctcagtgccacccttcgcctatgaagacattgcccgcaacatcaacagtagctgccggccaggcccgggcgcctggctgcgggttgtccttgagaaaccctttggccatgaccacttctcagcccagcagctggccacagaactcgggacctttttccaggaggaggagatgtaccgggtggaccattacttaggcaagcaggctgtggcgcagatcctgcctttccgagaccagaaccgcaaggctttggacggcctctggaaccggcaccatgtggagcgggtggagatcatcatgaaagagaccgtggatgctgaaggccgcaccagcttctatgaggagtacggtgtcattcgcgacgtcctccagaaccatctgacggaggtcctcaccctcgtggccatggagctgccccacaatgtcagcagtgcggaggctgtgctgcggcacaagcttcaggtcttccaggcgctgcggggcctgcagaggggcagtgccgtcgtgggccagtaccagtcttacagtgagcaggtgcgcagagagctgcagaagccagacagcttccacagcctgacgccgaccttcgcagccgtcctagtgcacattgacaaccttcgctgggagggcgtgcctttcatcctgatgtctggcaaagccttggacgagagagtgggctacgctcggatcttgttcaagaaccaggcctgctgtgtgcagagcgaaaagcactgggccgcggcgcagagccagtgcctgccccggcagctcgtcttccacatcggccatggcgacctgggcagccctgccgtgctggtcagcaggaacctgttcaggccctccctgccctccagctggaaggaaatggagggaccacctgggctccgccttttcggcagccctctgtccgattactacgcctacagccctgtgcgggagcgggacgcccactccgtcctcttatcccatatcttccatggccggaagaatttcttcatcaccacagagaacttgctggcctcctggaacttctggacccctctgctggagagcctggcccataaggccccacgcctctaccctggaggagctgagaatggccgtctgttggactttgagttcagtagcggccggttgttcttttcccagcagcagccggagcagctggtgccagggccagggccggccccaatgcccagtgacttccaggtcctcagggccaagtaccgagagagcccgctggtctccgcctggtccgaggagctgatctctaagctggctaatgacatcgaggccaccgctgtgcgagccgtgcggcgctttggccagttccacctggcactgtcggggggctcgagccccgtggccctgttccagcagctggccacggcgcactatggcttcccctgggcccacacgcacctgtggctggttgacgagcgctgcgtcccactctcagacccggagtccaacttccagggcctgcaggcccacctgctgcagcacgtccggatcccctactacaacatccaccccatgcctgtgcacctgcagcagcggctctgcgccgaggaggaccagggcgcccagatctatgccagggagatctcagccctggtggccaacagcagcttcgacctggtgctgctgggcatgggtgccgacgggcacacagcctccctcttcccacagtcacccactggcctggatggcgagcagctggtcgtgctgaccacgagcccctcccagccacaccgccgcatgagccttagcctgcctctcatcaaccgcgccaagaaggtggcagtcctggtcatgggcaggatgaagcgtgagatcaccacgctggtgagccgggtgggccatgagcccaagaagtggcccatctcgggtgtcctgccgcactccggccagctggtgtggtacatggactacgacgccttcctgggatgagggcgcctgtgccccttgcccgcttcgctcctgtgctttccttcgcccgtgtcttccctcccttctcggccccgccacctgcccagcgtgccctggctctccagaaccttctatcccacagtcaggccccagagagggcaggacaagccttgtcccgatgcctttgaccggcagctctgtgtattggtggatagatgcagaaacaaggaagaaatggagtctgctcctgagaagcttcaaattcaggccaggagagaagtcttaagaaaagacctccagcagttacacattcatatcaaccagcacaacacgggatggcgcccaaactccggcgttcacaagaggagacgtgacgtggtgggctgaggttaatcagggaaggtttcctgggggaggtgatccttgaactggctcccggggaacattcagagcatgattggtagacagaagggtgcagaggcgcccaggggagtacattgccccgtgcaaagcaggggcattggggactgtcttgagaccctgagggggtcaagcccctccttccccagctgcccctccttctagaacctctgcacatctagcctctggccctcctcttcactgcctccacctgctcccgcttgccatccctgtctcctccatcctggctgtgcagtaggaattccaggctcctccctgtgtctttgctgttcttcagactccatttatagagaatgagggctgataacaggaatacagtggcaaagactagactgtggaaagggttccagaaatcttttttcttttttaattaaaaaaaatatttgcagagatgagctcttgctatgttgcccaggctggtctcaaactcctgggctcaagcgatcctcccatctcagcctcccagagtgctgggattacaggtgtgagctactgcgcccagccccagaaatctcagtgctgtttggagctccatttctcatttgatgacttgctctgcgtggggaggtggggtctcattcccccaacttcctcagggaggacccctgccctccgctgctcctctgtcctgctagccttcctccaggaagcacactgggtgcagataatcaggacattccagagatccccaatttaagagggtcatttccatctcaggggactcccggatgggtgtttccgctctcaatagcccctcttgttttaccaggaaagatccagttaaatcacccactgaggtgacagctcattagcggggagagagatggagcatcgagtgacactgggccatccaggcggctctgctcccaccagacaggagctaggcctcactggcaggggggctgcccacagccttttcaggggctcgcttggcgggtgacggggccgcagccaggccttctctccctgccccttggtgaccccgtggcttcctgtctgctggcctctcctgctacttatcacttcaccacgaactctctgcctgagactggggaagtaagcgggtatcttctcagtgagcataggttggggactgtgatcttgagaagccatgggccagcaatacctgcttttctgaagcccccaaggagggctctgacattctttttaaaaacaccacaaagcaaaattcccaggacatgtgtagttttgtttgttcagtatcccacaacttaaggctgggagatggaactcttggttaaggtcgatttttctgtctggcttctccgcaccttccacttgctctctggatcaggcagatataaactttctagcgcattttgagagagggctttcttgggtgagggagcatggcaaagtcggtttctctctggactgtttacacttcaaggcggtggatttagaggaatcctggctttcattttcaatgccagtctgagacatgttcccaagccggggctcttgttcacaccacttactctggccaccaacaacaacccaggccagacagagcatctcttttttttttttttgagacagagtctctgtcgcccaggctggagcccagtggcgagatcttggctcactacaacctccacctcccgggttcaggcaattctcgtgcctaagcctcccgagtagctgcgactacaggcgccggccagcatgcctgtctaatttttgtattttagtagagacagggtttcaccatgttgcccaggctggtctcgaactcctgagctcaggcagtctacccacctcagcctcccaaagtgctgggattacaggcgtgagccaccgcgcccagccagaacatctgtttttacacccagagagcgcccctcgttaggacagaaccacggtgcccagagccaggaagccgccctcctggcgcccagcatctgagcttctacacgtgatgggcgggctcaggagaggacagggagtcgtggtggaagttccacagctggccgcgtgggggggcccttgcaccgcactgccgcctcctgactgcccctatccccgcagcccctgtgccggatttcatttccctcctctctcccagggtacctggccccagcactctcccatctgttcttcaggaaccgactcctctccagttgcaacaccagggagaaaggggcctccacatgcccaagtacccctgcaggatgaagggcaggccggcccttgatgtgccatttctgaataatagtcactgccgccgagtctaggatgtcctgttctaactcagccctgcctcggatgcaccaccgatctgtgcagagtgggtgtgggagtgtgggtgagggtcgaaatgccaaaggtctactttccagaatcaagtgccttctgcaaatcatgttggaaaagtccaaacctggagatgtccctgtgcctccgcccctacccaccccttttccttcagctgtgttaggaaggagaagttttcagaaccctctaggctggtggctttcaaacttcagaccatgatctgcagcaagaaacgtgccttccatcataaatcagtccatttgtttacaactgtgttccaagcaggtttcataaagaaattcttaaccttagaacctcggatatcctctatgttttagttttcatttttttaaaatgcttcttaaaattcactaaattgggctaggtgtggctcatgcctgtaatcccagcactatgggaggctgaggtgagaggatcacttgagcccagaaggttgaaaccagcctgggcaacatagtgagaccccatctctacaaaaagttttaaaaccaggtatggtggtgccctcctgtggtcccagctactcgggagtctgaggtgggaggatcacctgagcccaggagactgaggctgcagtaaggtgtgattgcactattgctctctagcctggaaaacagagtgagaccctatctcaaaaaaaaaaaaaaaaaaaaaggaaagagtgatgacaacagcccagggagcagccccgctcagaacccaagtcccaagttccagcactgtgttcccaggcaggctgtttgcctcttcctggtctggaagcccttgggtcctatggtggcggcagctcccacagtccaggttccctggtggggaccaatgattccatccgcatggaagcccacgtgtgcacttaggggcccataaatggcagaagggcccctcctttgggagaccttgtcagtcagcatctctagggcaaccgtgattgccatttgtagaggggaaggaatcaagggactttaagctagatcaaaatctggggacaaattctcctgctaactgcaagttaaaataggcccttcttactgaatttccctgtttgtttctctgcagacaatgctttagccctactcttgggcccccaagttagcagagtaatcaaagcttcctaccgtttggcctactattccagactagtccctcgaggggttcccttccaaaatatgcagggctcaggctcccaattccgggcctgtctgctttgcttgtgtttctcctgtccctgttctcccggagggcccaggtggaactcacgacagggagggagacgcttcccaaaaacctgcagggctatttcccagaatttggttttcaagtacaaaactttttgtcctgtaagatatatgcagcctcacagaagcagcctctgcctccactttaccagctacgtttttatcttaagcacatggggctcccttagaacttactccactgatttaaaaaaaaaaaactgcctggcagcatctcagtgtcagagtgagcacggcacaggaaaggcccgtggtgacgagggtgaggtggccacagtgaccggacgacaaatgagactctgcaaatgagactccagagggtgaagatctgcggtctccagacatcataggccatgtgacccactaggggccgcttacccctggccgtccgctggctgaactgaacgcattccctctctccgcaactctcccgtgaggctgcacccgtgtgggtagcactggaagcggcactgtttgcattgtacataggaaggaaggaagttcttccagcctcaccagcacctggcagcgagtcagagcctgtgagggcatccgaagcagtgatgcagtgtcaacctcccagctggtgccactctgccctcgggggctccaagcattgtaactcagtcatgggagctgcctctttggaagtgcagatttattcctgtaataatcctgcctgcttttacctctcgtccactgaccagcaagtgtgagtcccggtgtcagtcggcacagtccagtgtccatctgcatttgctcatgcagagggggtgagttgggcactccctgttgttggttttccttttgcagcacactgggcagtctccctataaaacaaaaaccccaccttctgtgccttctgctttagagcagagctccccctcccatttcctcagtcttccctgcaaaatctgtccaccggggaaggcagcaggaaccctgggcagcgggtgttctgggaaggctagtgacagcagatgtcatccaggaacagccacacacggttctccaggccgccgtcagcagctcaaggtggggtatgagtgagaagctgaggatctcgcagcttgttgctgagcaaggtgcaaccgggctcatgctgtcatcagcacaagacgggatggcaagggctttcagacgcatttccaagagtccagcaagccagggggaagatgatccctttgccgaagtgtaccctctagccaacttttgggagcgcttctgtttgcaaagcgctggggatgtgcctgtctctgtgtgacccacgaacgggaagggagagcactggagtaatgacacttctgctgctgctttgattctcaaggctgatctttaaaaccctcgccttgctgacaggtgctttaaaggcagtctgcatcttttcttcccttggtgtgggagaggtaaacactttgatttgctgaaagctgtatggagtatatttgaacagctagtagttagctttgaaagtggaagtgtgaacagacactacttgtgtcgctttgggtccttcactttacccccacagaagtctagaggcgtctgttataaagcgttacggggcgcctgcatgcaggaggaaggacctgtattagctggaaatcatcaggaacccagcttgcctccatctctctgagatgtgctgggtacagcctgcccctcctagttctgtccaccgggaagagccggctggcggcagatccccaggggcagagcccctgctggatcctgggagctcatctttacctgtgccggagtgggaactgtgattccagccgggcaggtcagagtggagcagtgctaagaggctgttgcaggagaactagacgggcggggcctgctgcatctggatcatgtttctgtgctctgccccgcgctagggactcagggtctgggcttctgccaggtgaggagcagagagactgttcccttgggtggagaggtgtgggcatgagagccacccattgccaagcagcaagaatgttcgtgcttttttccagagaggggaaccccactggtttttgtggaaacaatggaaacttacagatgcctgcctgggatgatgaggcacattcagaacaaatgcttttttttttttgagacagagtctcgctctgacgcccaggctggagtgcagtggcgcgatctcggctcactgcaaactttgcctcccaggttcaagtgattctcctacctcagcctcccgagtagctgggattacaccaccatgcccagcaaatttttgtgtttttagtagagacggagtttcaccatgttggccaggctggtctcgaactcctgacctcaggtgatccatccgccttggcctcccaaagtgctgggattacaggcgggagccaccatgcctggccagaacaaatgcctttttaaaccttttaagaacatttttaaaatgtctttttctatgtcaaatgtaacgtttatttttttaaacaataaaattgatttgccaaaa

SEQ ID NO: 120 - DNA, 732 bp, Homo sapiens
catcggcgctttgccacttgtacccgagtttttgattctcaacatgtccgagactgctcctgccgctcccgctgccgcgcctcctgcggagaaggcccctgtaaagaagaaggcggccaaaaaggctgggggtacgcctcgtaaggcgtctggtcccccggtgtcagagctcatcaccaaggctgtggccgcctctaaagagcgtagcggagtttctctggctgctctgaaaaaagcgttggctgccgccggctatgatgtggagaaaaacaacagccgtatcaaacttggtctcaagagcctggtgagcaagggcactctggtgcaaacgaaaggcaccggtgcttctggctcctttaaactcaacaagaaggcagcctccggggaagccaagcccaaggttaaaaaggcgggcggaaccaaacctaagaagccagttggggcagccaagaagcccaagaaggcggctggcggcgcaactccgaagaagagcgctaagaaaacaccgaagaaagcgaagaagccggccgcggccactgtaaccaagaaagtggctaagagcccaaagaaggccaaggttgcgaagcccaagaaagctgccaaaagtgctgctaaggctgtgaagcccaaggccgctaagcccaaggttgtcaagcctaagaaggcggcgcccaagaagaaataggcgaacgcctacttctaaaacccaaaaggctcttttcagagccacca

SEQ ID NO: 121 - DNA, 1978 bp, Homo sapiens
gagttgtgcacccggcggagcccggaggagcccggcgcacctcgcgcggcggccgctcccgctggagccggagcccgagcccgagcccgggcccgggtgaggggcggggagagacacgggctgcggcgcggcaggagagtggggggtcgggcgccccccgcagctcaggacatgggagtcccaccgtattgtccaggctggtctcgaactcctgacctcaagcagtcctcctgctttggcatcccaaagtgctgggattacagcatcccagccatcactcttccacctgctccttagagaagggaagatgagtgagtcgagctcgaagtccagccagcccttggcctccaagcaggaaaaggacggcactgagaagcggggccggggcaggccgcgcaagcagcctccggtgagtcccgggacagcgctggtagggagtcagaaggagcccagcgaagtgccaacacctaagagacctcggggccgaccaaagggaagcaaaaacaagggtgctgccaagacccggaaaaccaccacaactccaggaaggaaaccaaggggcagacccaaaaaactggagaaggaggaagaggagggcatctcgcaggagtcctcggaggaggagcagtgacccatgcgtgccgcctgctcctcactggaggagcagcttccttctgggactggacagctttgctccgctcccaccgcccccgccccttccccaggcccaccatcaccaccgcctctggccgccacccccatcttccacctgtgccctcaccaccacactacacagcacaccagccgctgcagggctcccatgggctgagtggggagcagttttcccctggcctcagttcccagctccccccgcccacccacgcatacacacatgccctcctggacaaggctaacatcccacttagccgcaccctgcacctgctgcgtccccactcccttggtggtggggacattgctctctgggcttttggtttgggggcgccctctctgctccttcactgttccctctggcttcccatagtggggcctgggagggttcccctggccttaaaaggggcccaagccccatctcatcctggcacgccctactccactgccctggcagcagcaggtgtggccaatggaggggggtgctggcccccaggattcccccagccaaactgtctttgtcaccacgtggggctcacttttcatccttccccaacttccctagtccccgtactaggttggacagcccccttcggctacaggaaggcaggaggggtgagtcccctactccctcttcactgtggccacagcccccttgccctccgcctgggatctgagtacatattgtggtgatggagatgcagtcacttattgtccaggtgaggcccaagagccctgtggccgccacctgaggtgggctggggctgctcccctaaccctactttgcttccgccactcagccatttccccctcctcagatggggcaccaataacaaggagctcaccctgcccgctcccaacccccctcctgctcctccctgccccccaaggttctggttccatttttcctctgttcacaaactacctctggacagttgtgttgttttttgttcaatgttccattcttcgacatccgtcattgctgctgctaccagcgccaaatgttcatcctcattgcctcctgttctgcccacgatcccctcccccaagatactctttgtggggaagaggggctggggcatggcaggctgggtgaccgactaccccagtcccagggaaggtggggccctgcccctaggatgctgcagcagagtgagcaagggggcccgaatcgaccataaagggtgtaggggccacctcctccccctgttctgttggggaggggtagccatgatttgtcccagcctggggctccctctctggtttcctatttgcagttacttgaataaaaaaaatatccttttctgga

SEQ ID NO: 122 - DNA, 1277 bp, Homo sapiens
gatgtggcccgtggcctagctcgtcaagttgccgtggcgcggagaactctgcaaaacaagaggctgaggattgcgttagagataaaccagttcacgccggagccccgtgagggaagcgtctccgttgggtccggccgctctgcgggactctgaggaaaagctcgcaccaggtggacgcggatctgtcaacatgggtaaaggagaccccaacaagccgcggggcaaaatgtcctcgtacgccttcttcgtgcagacctgccgggaagagcacaagaagaaacacccggactcttccgtcaatttcgcggaattctccaagaagtgttcggagagatggaagaccatgtctgcaaaggagaagtcgaagtttgaagatatggcaaaaagtgacaaagctcgctatgacagggagatgaaaaattacgttcctcccaaaggtgataagaaggggaagaaaaaggaccccaatgctcctaaaaggccaccatctgccttcttcctgttttgctctgaacatcgcccaaagatcaaaagtgaacaccctggcctatccattggggatactgcaaagaaattgggtgaaatgtggtctgagcagtcagccaaagataaacaaccatatgaacagaaagcagctaagctaaaggagaaatatgaaaaggatattgctgcatatcgtgccaagggcaaaagtgaagcaggaaagaagggccctggcaggccaacaggctcaaagaagaagaacgaaccagaagatgaggaggaggaggaggaagaagaagatgaagatgaggaggaagaggatgaagatgaagaataaatggctatcctttaatgatgcgtgtggaatgtgtgtgtgtgctcaggcaattattttgctaagaatgtgaattcaagtgcagctcaatactagcttcagtataaaaactgtacagatttttgtatagctgataagattctctgtagagaaaatacttttaaaaaatgcaggttgtagctttttgatgggctactcatacagttagattttacagcttctgatgttgaatgttcctaaatatttaatggtttttttaatttctgtgtgtatggtagcacagcaaacttgtaggaattagtatcaatagtaaattttgggttttttaggatgttgcatttcgtttttttaaaaaaaattttgtaataaaattatgtatattatttctattgtctttgtcttaatatgctaagttaattttcactttaaaaaagccatttgaagaccaaaaaaaaaaaaa

SEQ ID NO: 123 - DNA, 3002 bp, Homo sapiens
gccagtcaccttcagtttctggagctggccgtcaacatgtcctttcctaaggcgcccttgaaacgattcaatgacccttctggttgtgcaccatctccaggtgcttatgatgttaaaactttagaagtattgaaaggaccagtatcctttcagaaatcacaaagatttaaacaacaaaaagaatctaaacaaaatcttaatgttgacaaagatactaccttgcctgcttcagctagaaaagttaagtcttcggaatcaaaggaatctcaaaagaatgataaagatttgaagatattagagaaagagattcgtgttcttctacaggaacgtggtgcccaggacagccggatccaggatctggaaactgagttggaaaagatggaagcaaggctaaatgctgcactaagggaaaaaacatctctctctgcaaataatgctacactggaaaaacaacttattgaattgaccaggactaatgaactactaaaatctaagttttctgaaaatggtaaccagaagaatttgagaattctaagcttggagttgatgaaacttagaaacaaaagagaaacaaagatgaggggtatgatggctaagcaagaaggcatggagatgaagctgcaggtcacccaaaggagtctcgaagagtctcaagggaaaatagcccaactggagggaaaacttgtttcaatagagaaagaaaagattgatgaaaaatctgaaacagaaaaactcttggaatacatcgaagaaattagttgtgcttcagatcaagtggaaaaatacaagctagatattgcccagttagaagaaaatttgaaagagaagaatgatgaaattttaagccttaagcagtctcttgaggagaatattgttatattatctaaacaagtagaagatctaaatgtgaaatgtcagctgcttgaaaaagaaaaagaagaccatgtcaacaggaatagagaacacaacgaaaatctaaatgcagagatgcaaaacttaaaacagaagtttattcttgaacaacaggaacgtgaaaagcttcaacaaaaagaattacaaattgattcacttctgcaacaagagaaagaattatcttcgagtcttcatcagaagctctgttcttttcaagaggaaatggttaaagagaagaatctgtttgaggaagaattaaagcaaacactggatgagcttgataaattacagcaaaaggaggaacaagctgaaaggctggtcaagcaattggaagaggaagcaaaatctagagctgaagaattaaaactcctagaagaaaagctgaaagggaaggaggctgaactggagaaaagtagtgctgctcatacccaggccaccctgcttttgcaggaaaagtatgacagtatggtgcaaagccttgaagatgttactgctcaatttgaaagctataaagcgttaacagccagtgagatagaagatcttaagctggagaactcatcattacaggaaaaagcggccaaggctgggaaaaatgcagaggatgttcagcatcagattttggcaactgagagctcaaatcaagaatatgtaaggatgcttctagatctgcagaccaagtcagcactaaaggaaacagaaattaaagaaatcacagtttcttttcttcaaaaaataactgatttgcagaaccaactcaagcaacaggaggaagactttagaaaacagctggaagatgaagaaggaagaaaagctgaaaaagaaaatacaacagcagaattaactgaagaaattaacaagtggcgtctcctctatgaagaactatataataaaacaaaaccttttcagctacaactagatgcttttgaagtagaaaaacaggcattgttgaatgaacatggtgcagctcaggaacagctaaataaaataagagattcatatgctaaattattgggtcatcagaatttgaaacaaaaaatcaagcatgttgtgaagttgaaagatgaaaatagccaactcaaatcggaagtatcaaaactccgctgtcagcttgctaaaaaaaaacaaagtgagacaaaacttcaagaggaattgaataaagttctaggtatcaaacactttgatccttcaaaggcttttcatcatgaaagtaaagaaaattttgccctgaagaccccattaaaagaaggcaatacaaactgttaccgagctcctatggagtgtcaagaatcatggaagtaaacatctgagaaacctgttgaagattatttcattcgtcttgttgttattgatgttgctgttattatatttgacatgggtattttataatgttgtatttaattttaactgccaatccttaaatatgtgaaaggaacattttttaccaaagtgtcttttgacattttattttttcttgcaaatacctcctccctaatgctcacctttatcacctcattctgaaccctttcgctggctttccagcttagaatgcatctcatcaacttaaaagtcagtatcatattattatcctcctgttctgaaaccttagtttcaagagtctaaaccccagattcttcagcttgatcctggaggtcttttctagtctgagcttctttagctaggctaaaacaccttggcttgttattgcctctactttgattctgataatgctcacttggtcctacctattatccttctacttgtccagttcaaataagaaataaggacaagcctaacttcatagaaacctctctatttttaatcagttgtttaataatttacaggttcttaggctccatcctgtttgtatgaaattataatctgtggattggcctttaagcctgcattcttaacaaactcttcagttaattcttagatacactaaaaatctgagaaactctacatgtaactatttcttcagagtttgtcatatactgcttgtcatctgcatgtctactcagcatttgattaacatttgtgtaatatgaaataaaattacacagtaagtcatttaaccaaaaaaaaaaaaaaaa

SEQ ID NO: 124 - DNA, 3284 bp, Homo sapiens
gccggttggaggcggccgaaccgcagtagggaaagacccaggctgcgggacgcggtgcaggctgcggcgctgacggcctctgctccttccgcgggtttccgactccctgccctagattttctgcttagcgacttggggtcccctctcgtttgcttctggtaggagtcgcaatcccagcagcaatagcccagaagaggacacggttcccgtaccgaagggttcagtaccagcagcccgaccatcacgcggcgggatgtctgtggttggcattgacctcggctttctcaactgctacattgctgtcgcgagaagtggcggcatcgagaccatcgccaatgagtacagcgacaggtgtaccccggcctgtatatcattgggatcaagaactcgagccattggaaatgcagcaaagagccagatagtcacgaacgtaagaaatacaattcatggcttcaaaaagcttcatgggcgatcatttgatgatcccattgtgcaaactgaaaggatcaggcttccctatgaactgcagaaaatgcctaatggaagtgcaggagttaaggtgcggtacttagaggaagagagaccttttgcaattgagcaagttactggaatgctgttagccaagcttaaagagacttcagaaaatgctttgaagaaaccagtggctgactgtgtgatttcaattcctagcttttttactgatgccgagagaagatctgtgatggctgcagcccaggttgcaggcttaaattgtttaaggttgatgaatgaaactactgcagttgcactggcgtatggaatttataaacaggatcttcccccattagatgagaaaccaagaaatgtagtatttattgatatgggacattctgcctatcaggtcttggtttgtgcttttaacaaaggaaaacttaaagtcttggctactacctttgatccatatttgggtggcaggaactttgatgaggctttagtagactacttctgtgatgagttcaagaccaaatataagataaatgtgaaagaaaactctcgggccttgttgcgtttatatcaggaatgtgaaaaactaaagaagctaatgagtgcaaatgcatcagatcttccattgaacattgagtgtttcatgaatgaccttgatgtttctagtaaaatgaacagggctcaatttgaacaactgtgtgcttcccttttggccagggttgaaccacctttaaaagcagtaatggaacaagctaacttacaacgtgaagacattagtagtatagaaattgtaggaggagcaacacgaattcctgcagtgaaagaacaaatcactaaattctttcttaaagacataagtaccacattaaatgctgatgaagctgttgcaagaggatgtgcgttacagtgtgcgattctctcaccagcatttaaagtgcgtgaattttccataacagaccttgttccctattcaatcacattaaggtggaagacctcttttgaagatggaagtggggaatgtgaagttttctgtaagaaccatcctgccccattctcaaaagtcattactttccacaagaaggaaccatttgaactagaagcattttatactaatttacatgaagtgccttatcctgatgcaagaattgggagcttcactattcagaatgtttttccacagtctgatggtgatagttccaaagtgaaggttaaagttcgtgttaacatccatggaatcttcagtgtggctagcgcatcagtaattgagaagcaaaatttggaaggcgatcacagtgatgctccaatggagacagaaacttcatttaaaaatgaaaacaaagataatatggataaaatgcaggttgatcaagaagaagggcatcaaaaatgtcatgctgaacacactccagaagaggaaattgatcatacaggagccaaaacaaagtcagctgtctcagacaaacaagaccgattaaatcagacacttaaaaaaggaaaagtcaaaagtattgatctaccgatccagagtagcctatgtagacaactaggccaagatcttctcaacagctacattgaaaatgaggggaagatgatcatgcaagataagttagagaaagaaagaaatgatgctaagaatgccgttgaagaatatgtatatgattttagagacaggctgggcactgtctatgaaaaattcatcactccagaagacttgagtaaactgtctgcagtattggaagacacagaaaattggctttatgaagacggagaggaccaacctaaacaagtttatgtggataagcttcaagaactaaagaaatacggccagcctattcaaatgaagtacatggagcatgaagagagaccaaaagccttaaatgacttgggaaaaaagatccaacttgtcatgaaagtgatagaagcttatagaaacaaggatgaaagatatgatcatctggatcctactgaaatggaaaaggttgaaaaatgtatcagtgatgccatgagttggctgaatagtaagatgaatgcacagaacaaactaagtctcactcaagatcctgtggtaaaagtttcagaaatagtagcaaagtcaaaggaactggataatttctgtaaccccatcatttacaagcccaaaccaaaagcagaagttcctgaagacaaaccaaaagctaatagtgaacacaatggcccaatggatggacagagtggaactgaaactaaatcagattcaacaaaagacagctcacagcatactaaatcctctggagagatggaagtggactaagtcttaattttaccttcacattaattcaaaccgtgcaagtaaccacggggtccatcttttacatctggtacacacaacagacgctcagttgttcttaaccacttttgtcatttgttttttggagtagttttgaaaagtgttttatattgagtgcacttctgttcatttccattgctgcttatatgcagtgttagccgaattagatttacaagacaatctaagctttccggataattttatatatcaaacatacaggatggatacatagttggcaacagtctaccttatttaaagcttctactgggataaacctcaattcctttattcaggaaaggatactttattgcattattgttgcagaagcatagatttaattgcatctttattttgaaaaacaaatgaaaattgatggggtttaaagctacagaggcactgacctttttctagttattgtattgctacaatttaaatattaaaacaaataagagctttcccaaaaaaaaaaaaaaaa

SEQ ID NO: 125 - DNA, 3392 bp, Homo sapiens
gcggagccagcccctcccctacccggagcagcccgctggggccgtcccgagcggcgacacactaggagtcccggccggccagccagggcagccgcggtcccgggactcggccgtgagtgctgcgggacggatggtggcggcggggcgcgggccagcgcgggcgccgtgagccggagctgcgcgcggggcatgcggctgcggcccccggccctcggcccccgcgctccggccccagccccggccgccggcccccgcggagtgcagcgaccgcgccgccgctgagggaggcgccccaccatgccgcgggccccggcgccgctgtacgcctgcctcctggggctctgcgcgctcctgccccggctcgcaggtctcaacatatgcactagtggaagtgccacctcatgtgaagaatgtctgctaatccacccaaaatgtgcctggtgctccaaagaggacttcggaagcccacggtccatcacctctcggtgtgatctgagggcaaaccttgtcaaaaatggctgtggaggtgagatagagagcccagccagcagcttccatgtcctgaggagcctgcccctcagcagcaagggttcgggctctgcaggctgggacgtcattcagatgacaccacaggagattgccgtgaacctccggcccggtgacaagaccaccttccagctacaggttcgccaggtggaggactatcctgtggacctgtactacctgatggacctctccctgtccatgaaggatgacttggacaatatccggagcctgggcaccaaactcgcggaggagatgaggaagctcaccagcaacttccggttgggatttgggtcttttgttgataaggacatctctcctttctcctacacggcaccgaggtaccagaccaatccgtgcattggttacaagttgtttccaaattgcgtcccctcctttgggttccgccatctgctgcctctcacagacagagtggacagcttcaatgaggaagttcggaaacagagggtgtcccggaaccgagatgcccctgaggggggctttgatgcagtactccaggcagccgtctgcaaggagaagattggctggcgaaaggatgcactgcatttgctggtgttcacaacagatgatgtgccccacatcgcattggatggaaaattgggaggcctggtgcagccacacgatggccagtgccacctgaacgaggccaacgagtacactgcatccaaccagatggactatccatcccttgccttgcttggagagaaattggcagagaacaacatcaacctcatctttgcagtgacaaaaaaccattatatgctgtacaagaattttacagccctgatacctggaacaacggtggagattttagatggagactccaaaaatattattcaactgattattaatgcatacaatagtatccggtctaaagtggagttgtcagtctgggatcagcctgaggatcttaatctcttctttactgctacctgccaagatggggtatcctatcctggtcagaggaagtgtgagggtctgaagattggggacacggcatcttttgaagtatcattggaggcccgaagctgtcccagcagacacacggagcatgtgtttgccctgcggccggtgggattccgggacagcctggaggtgggggtcacctacaactgcacgtgcggctgcagcgtggggctggaacccaacagtgccaggtgcaacgggagcgggacctatgtctgcggcctgtgtgagtgcagccccggctacctgggcaccaggtgcgagtgccaggatggggagaaccagagcgtgtaccagaacctgtgccgggaggcagagggcaagccactgtgcagcgggcgtggggactgcagctgcaaccagtgctcctgcttcgagagcgagttcggcaagatctatgggcctttctgtgagtgcgacaacttctcctgtgccaggaacaagggagtcctctgctcaggccatggcgagtgtcactgcggggaatgcaagtgccatgcaggttacatcggggacaactgtaactgctcgacagacatcagcacatgccggggcagagatggccagatctgcagcgagcgtgggcactgtctctgtgggcagtgccaatgcacggagccgggggcctttggggagatgtgtgagaagtgccccacctgcccggatgcatgcagcaccaagagagattgcgtcgagtgcctgctgctccactctgggaaacctgacaaccagacctgccacagcctatgcagggatgaggtgatcacatgggtggacaccatcgtgaaagatgaccaggaggctgtgctatgtttctacaaaaccgccaaggactgcgtcatgatgttcacctatgtggagctccccagtgggaagtccaacctgaccgtcctcagggagccagagtgtggaaacacccccaacgccatgaccatcctcctggctgtggtcggtagcatcctccttgttgggcttgcactcctggctatctggaagctgcttgtcaccatccacgaccggagggagtttgcaaagtttcagagcgagcgatccagggcccgctatgaaatggcttcaaatccattatacagaaagcctatctccacgcacactgtggacttcaccttcaacaagttcaacaaatcctacaatggcactgtggactgatgtttccttctccgaggggctggagcggggatctgatgaaaaggtcagactgaaacgccttgcacggctgctcggcttgatcacagctccctaggtaggcaccacagagaagaccttctagtgagcctgggccaggagcccacagtgcctgtacaggaaggtgcctggccatgtcacctggctgctaggccagagccatgccaggctgcgtccctccgagcttgggataaagcaaggggaccttggcactctcagctttccctgccacatccagcttgttgtcccaatgaaatactgagatgctgggctgtctctcccttccaggaatgctgggcccccagcctggccagacaagacgactgtcaggaagggtcggagtctgtaaaaccagcatacagtttggcttttttcacattgatcatttttatatgaaataaaaagatcctgcatttatggtgtagttctgagtcctgagacttttccgcgtgatggctatgccttgcacacaggtgttggtgatggggctgttgagatgcctgttgaaggtacatcgtttgcaaatgtcagtttcctctcctgtccgtgtttgtttagtacttttataatgaaaagaaacaagattgtttgggattggaagtaaagattaaaaccaaaagaatttgtgtttgtctgataaaaaaaaaaaaaaaaaaaaa

SEQ ID NO: 126 - DNA, 4908 bp, Homo sapiens
acctgcgtgcagtcggtcctccaggccacgcagcgcccgagagtaccagggagactccggcccctgtcggcgccaagcccctccgcccctcacagcgcccaggtccgcggccgggccttgattttttggcggggaccgtcatggcgtcgcagccaaattcgtctgcgaagaagaaagaggagaaggggaagaacatccaggtggtggtgagatgcagaccatttaatttggcagagcggaaagctagcgcccattcaatagtagaatgtgatcctgtacgaaaagaagttagtgtacgaactggaggattggctgacaagagctcaaggaaaacatacacttttgatatggtgtttggagcatctactaaacagattgatgtttaccgaagtgttgtttgtccaattctggatgaagttattatgggctataattgcactatctttgcgtatggccaaactggcactggaaaaacttttacaatggaaggtgaaaggtcacctaatgaagagtatacctgggaagaggatcccttggctggtataattccacgtacccttcatcaaatttttgagaaacttactgataatggtactgaattttcagtcaaagtgtctctgttggagatctataatgaagagctttttgatcttcttaatccatcatctgatgtttctgagagactacagatgtttgatgatccccgtaacaagagaggagtgataattaaaggtttagaagaaattacagtacacaacaaggatgaagtctatcaaattttagaaaagggggcagcaaaaaggacaactgcagctactctgatgaatgcatactctagtcgttcccactcagttttctctgttacaatacatatgaaagaaactacgattgatggagaagagcttgttaaaatcggaaagttgaacttggttgatcttgcaggaagtgaaaacattggccgttctggagctgttgataagagagctcgggaagctggaaatataaatcaatccctgttgactttgggaagggtcattactgcccttgtagaaagaacacctcatgttccttatcgagaatctaaactaactagaatcctccaggattctcttggagggcgtacaagaacatctataattgcaacaatttctcctgcatctctcaatcttgaggaaactctgagtacattggaatatgctcatagagcaaagaacatattgaataagcctgaagtgaatcagaaactcaccaaaaaagctcttattaaggagtatacggaggagatagaacgtttaaaacgagatcttgctgcagcccgtgagaaaaatggagtgtatatttctgaagaaaattttagagtcatgagtggaaaattaactgttcaagaagagcagattgtagaattgattgaaaaaattggtgctgttgaggaggagctgaatagggttacagagttgtttatggataataaaaatgaacttgaccagtgtaaatctgacctgcaaaataaaacacaagaacttgaaaccactcaaaaacatttgcaagaaactaaattacaacttgttaaagaagaatatatcacatcagctttggaaagtactgaggagaaacttcatgatgctgccagcaagctgcttaacacagttgaagaaactacaaaagatgtatctggtctccattccaaactggatcgtaagaaggcagttgaccaacacaatgcagaagctcaggatatttttggcaaaaacctgaatagtctgtttaataatatggaagaattaattaaggatggcagctcaaagcaaaaggccatgctagaagtacataagaccttatttggtaatctgctgtcttccagtgtctctgcattagataccattactacagtagcacttggatctctcacatctattccagaaaatgtgtctactcatgtttctcagatttttaatatgatactaaaagaacaatcattagcagcagaaagtaaaactgtactacaggaattgattaatgtactcaagactgatcttctaagttcactggaaatgattttatccccaactgtggtgtctatactgaaaatcaatagtcaactaaagcatattttcaagacttcattgacagtggccgataagatagaagatcaaaaaaaggaactagatggctttctcagtatactgtgtaacaatctacatgaactacaagaaaataccatttgttccttggttgagtcacaaaagcaatgtggaaacctaactgaagacctgaagacaataaagcagacccattcccaggaactttgcaagttaatgaatctttggacagagagattctgtgctttggaggaaaagtgtgaaaatatacagaaaccacttagtagtgtccaggaaaatatacagcagaaatctaaggatatagtcaacaaaatgacttttcacagtcaaaaattttgtgctgattctgatggcttctcacaggaactcagaaattttaaccaagaaggtacaaaattggttgaagaatctgtgaaacactctgataaactcaatggcaacctggaaaaaatatctcaagagactgaacagagatgtgaatctctgaacacaagaacagtttatttttctgaacagtgggtatcttccttaaatgaaagggaacaggaacttcacaacttattggaggttgtaagccaatgttgtgaggcttcaagttcagacatcactgagaaatcagatggacgtaaggcagctcatgagaaacagcataacatttttcttgatcagatgactattgatgaagataaattgatagcacaaaatctagaacttaatgaaaccataaaaattggtttgactaagcttaattgctttctggaacaggatctgaaactggatatcccaacaggtacgacaccacagaggaaaagttatttatacccatcaacactggtaagaactgaaccacgtgaacatctccttgatcagctgaaaaggaaacagcctgagctgttaatgatgctaaactgttcagaaaacaacaaagaagagacaattccggatgtggatgtagaagaggcagttctggggcagtatactgaagaacctctaagtcaagagccatctgtagatgctggtgtggattgttcatcaattggcggggttccatttttccagcataaaaaatcacatggaaaagacaaagaaaacagaggcattaacacactggagaggtctaaagtggaagaaactacagagcacttggttacaaagagcagattacctctgcgagcccagatcaacctttaattcacttgggggttggcaattttatttttaaagaaaacttaaaaataaaacctgaaaccccagaacttgagccttgtgtatagattttaaaagaatatatatatcagccgggcgcggtggctcatgcctgtaatcccagcactttgggaggctgaggcgggtggattgcttgagcccaggagtttgagaccagcctggccaacgtggcaaaacctcgtctctgttaaaaattagccgggcgtggtggcacactcctgtaatcccagctactggggaggctgaggcacgagaatcacttgaacccaggaagcggggttgcagtgagccaaaggtacaccactacactccagcctgggcaacagagcaagactcggtctcaaaaacaaaatttaaaaaagatataaggcagtactgtaaattcagttgaattttgatatctacccatttttctgtcatccctatagttcactttgtattaaattgggtttcatttgggatttgcaatgtaaatacgtatttctagttttcatataaagtagttcttttataacaaatgaaaagtatttttcttgtatattattaagtaatgaatatataagaactgtactcttctcagcttgagcttaacataggtaaatatcaccaacatctgtccttagaaaggaccatctcatgttttttttcttgctatgacttgtgtattttcttgcatcctccctagacttccctatttcgctttctcctcggctcactttctccctttttatttttcaccaaaccatttgtagagctacaaaacctatcctttcttattttcagtagtcagaattttatctagaaatcttttaacacctttttagtggttatttctaaaatcactgtcaacaataaatctaaccctagttgtatccctcctttaagtatttaaaacttgttgccccaaatgtgaaagcatttaattcctttaagaggcctaactcattcaccctgacagagttcacaaaaagcccactttagagtatacattgctattatgggagaccacccagacatctgactaatggctctgtgccacactccaagacctgtgccttttagagaagctcacaatgatttaaggactgtttgaaacttccaattatgtctataatttatattcttttgtttacatgatgaaactttttgttgttgcttgtttgtatataatacaatgtgtacatgtatctttttctcgattcaaatcttaacccttaggactctggtatttttgatctggcaaccatatttctggaagttgagatgtttcagcttgaagaaccaaaacagaaggaatatgtacaaagaataaattttctgctcacgatgagtttagtgtgtaaagtttagagacatctgactttgatagctaaattaaaccaaaccctattgaagaattgaatatatgctacttcaagaaactaaattgatctcgtagaattatcttaataaaataatggctataatttctctgcaaaatcagatgtcagcataagcgatggataatacctaataaactgccctcagtaaatccatggttaataaatgtggtttctacatt

SEQ ID NO: 127 - DNA, 3379 bp, Homo sapiens
ctggcctgggcctgaagtgagtgagaggcacatgaagagaagtattcaagtatttatacagataggaatcaagataatcaacaatgtctgtcactgaggaagacctgtgccaccatatgaaagtagtagttcgtgtacgtccggaaaacactaaagaaaaagcagctggatttcataaagtggttcatgttgtggataaacatatcctagtttttgatcccaaacaagaagaagtcagttttttccatggaaagaaaactacaaatcaaaatgttataaagaaacaaaataaggatcttaaatttgtatttgatgctgtttttgatgaaacgtcaactcagtcagaagtttttgaacacactactaagccaattcttcgtagttttttgaatggatataattgcacagtacttgcctatggtgccactggtgctgggaagacccacactatgctaggatcagctgatgaacctggagtgatgtatctaacaatgttacacctttacaaatgcatggatgagattaaagaagagaaaatatgtagtactgcagtttcatatctggaggtatataatgaacagattcgtgatctcttagtaaattcagggccacttgctgtccgggaagatacccaaaaaggggtggtcgttcatggacttactttacaccagcccaaatcctcagaagaaattttacatttattggataatggaaacaaaaacaggacacaacatcccactgatatgaatgccacatcttctcgttctcatgctgttttccaaatttacttgcgacaacaagacaaaacagcaagtatcaatcaaaatgtccgtattgccaagatgtcactcattgacctggcaggatctgagcgagcaagtacttccggtgctaaggggacccgatttgtagaaggcacaaatattaatagatcacttttagctcttgggaatgtcatcaatgccttagcagattcaaagagaaagaatcagcatatcccttacagaaatagtaagcttactcgcttgttaaaggattctcttggaggaaactgtcaaactataatgatagctgctgttagtccttcctctgtattctacgatgacacatataacactcttaagtatgctaaccgggcaaaggacattaaatcttctttgaagagcaatgttcttaatgtcaataatcatataactcaatatgtaaagatctgtaatgagcagaaggcagagattttattgttaaaagaaaaactaaaagcctatgaagaacagaaagccttcactaatgaaaatgaccaagcaaagttaatgatttcaaaccctcaggaaaaagaaatcgaaaggtttcaagaaatcctgaactgcttgttccagaatcgagaagaaattagacaagaatatctgaagttggaaatgttacttaaagaaaatgaacttaaatcattctaccaacaacagtgccataaacaaatagaaatgatgtgttctgaagacaaagtagaaaaggccactggaaaacgagatcatagacttgcaatgttgaaaactcgtcgctcctacctggagaaaaggagggaggaggaattgaagcaatttgatgagaatactaattggctccatcgtgtcgaaaaagaaatgggactcttaagtcaaaacggtcatattccaaaggaactcaagaaagatcttcattgtcaccatttgcacctccagaacaaagatttgaaagcacaaattagacatatgatggatctagcttgtcttcaggaacagcaacacaggcagactgaagcagtattgaatgctttacttccaaccctaagaaaacaatattgcacattaaaagaagccggcctgtcaaatgctgcttttgaatctgacttcaaagagatcgaacatttggtagagaggaaaaaagtggtagtttgggctgaccaaactggcgaacaaccaaagcaaaacgatctacccgggatttctgttcttatgaccttttcacaacttggaccagttcagcctattccttgttgctcatcttcaggtggaactaatctggttaagattcctacagaaaaaagaactcggagaaaactaatgccatctcccttgaaaggacagcatactctaaagtctccaccatctcaaagtgtgcagctcaatgattctcttagcaaagaacttcagcctattgtatatacaccagaagactgtagaaaagcttttcaaaatccgtctacagtaaccttaatgaaaccatcatcatttactacaagttttcaggctatcagctcaaacataaacagtgataattgtctgaaaatgttgtgtgaagtagctatccctcataatagaagaaaagaatgtggacaggaggacttggactctacatttactatatgtgaagacatcaagagctcgaagtgtaaattacccgaacaagaatcactaccaaatgataacaaagacattttacaacggcttgatccttcttcattctcaactaagcattctatgcctgtaccaagcatggtgccatcctacatggcaatgactactgctgccaaaaggaaacggaaattaacaagttctacatcaaacagttcgttaactgcagacgtaaattctggatttgccaaacgtgttcgacaagataattcaagtgagaagcacttacaagaaaacaaaccaacaatggaacataaaagaaacatctgtaaaataaatccaagcatggttagaaaatttggaagaaatatttcaaaaggaaatctaagataaatcacttcaaaaccaagcaaaatgaagttgatcaaatctgcttttcaaagtttatccaataccctttcaaaaatatatttaaaatctttgaaagaagacccatcttaaagctaagtttacccaagtactttcagcaagcagaaaaatgaaactctttgttttcttcttttgtgttctaaaaaaataaaatttcaaaagaaaaggttgtcttttaagttttttaaatatttgttgccttttaaaatccctgagtgtaagttaccatggtggcagcttagttttactatgccacaacaagttgactaggacattttagtaaatggtagtgagttaaattatctttattattttttaaaaataagaatttagaagtggtaaaattatggcccaagatgtatttggttctctattatgttttgatacattattttaatcatatatatgactttccttttcaaaaatactttaatgtacaagtgtaaatatatgtgcccataaaatcattgtaaatattatttagtcatcacaaataaaatattgtcccttgctacttgatatattaaagatgtagattttaaagtgaaaaaaaaaaaaaaaaa

SEQ ID NO: 128 - DNA, 2972 bp, Homo sapiens
tcttcggacctaggctgccctgccgtcatgtcgcaagggatcctttctccgccagcgggcttgctgtccgatgacgatgtcgtagtttctcccatgtttgagtccacagctgcagatttggggtctgtggtacgcaagaacctgctatcagactgctctgtcgtctctacctccctagaggacaagcagcaggttccatctgaggacagtatggagaaggtgaaagtatacttgagggttaggcccttgttaccttcagagttggaacgacaggaagatcagggttgtgtccgtattgagaatgtggagacccttgttctacaagcacccaaggactcgtttgccctgaagagcaatgaacggggaattggccaagccacacacaggttcaccttttcccagatctttgggccagaagtgggacaggcatccttcttcaacctaactgtgaaggagatggtaaaggatgtactcaaagggcagaactggctcatctatacatatggagtcactaactcagggaaaacccacacgattcaaggtaccatcaaggatggagggattctcccccggtccctggcgctgatcttcaatagcctccaaggccaacttcatccaacacctgatctgaagcccttgctctccaatgaggtaatctggctagacagcaagcagatccgacaggaggaaatgaagaagctgtccctgctaaatggaggcctccaagaggaggagctgtccacttccttgaagaggagtgtctacatcgaaagtcggataggtaccagcaccagcttcgacagtggcattgctgggctctcttctatcagtcagtgtaccagcagtagccagctggatgaaacaagtcatcgatgggcacagccagacactgccccactacctgtcccggcaaacattcgcttctccatctggatctcattctttgagatctacaacgaactgctttatgacctattagaaccgcctagccaacagcgcaagaggcagactttgcggctatgcgaggatcaaaatggcaatccctatgtgaaagatctcaactggattcatgtgcaagatgctgaggaggcctggaagctcctaaaagtgggtcgtaagaaccagagctttgccagcacccacctcaaccagaactccagccgcagtcacagcatcttctcaatcaggatcctacaccttcagggggaaggagatatagtccccaagatcagcgagctgtcactctgtgatctggctggctcagagcgctgcaaagatcagaagagtggtgaacggttgaaggaagcaggaaacattaacacctctctacacaccctgggccgctgtattgctgcccttcgtcaaaaccagcagaaccggtcaaagcagaacctggttcccttccgtgacagcaagttgactcgagtgttccaaggtttcttcacaggccgaggccgttcctgcatgattgtcaatgtgaatccctgtgcatctacctatgatgaaactcttcatgtggccaagttctcagccattgctagccagcttgtgcatgccccacctatgcaactgggattcccatccctgcactcgttcatcaaggaacatagtcttcaggtatcccccagcttagagaaaggggctaaggcagacacaggccttgatgatgatattgaaaatgaagctgacatctccatgtatggcaaagaggagctcctacaagttgtggaagccatgaagacactgcttttgaaggaacgacaggaaaagctacagctggagatgcatctccgagatgaaatttgcaatgagatggtagaacagatgcaacagcgggaacagtggtgcagtgaacatttggacacccaaaaggaactattggaggaaatgtatgaagaaaaactaaatatcctcaaggagtcactgacaagtttttaccaagaagagattcaggagcgggatgaaaagattgaagagctagaagctctcttgcaggaagccagacaacagtcagtggcccatcagcaatcagggtctgaattggccctacggcggtcacaaaggttggcagcttctgcctccacccagcagcttcaggaggttaaagctaaattacagcagtgcaaagcagagctaaactctaccactgaagagttgcataagtatcagaaaatgttagaaccaccaccctcagccaagcccttcaccattgatgtggacaagaagttagaagagggccagaagaatataaggctgttgcggacagagcttcagaaacttggtgagtctctccaatcagcagagagagcttgttgccacagcactggggcaggaaaacttcgtcaagccttgaccacttgtgatgacatcttaatcaaacaggaccagactctggctgaactgcagaacaacatggtgctagtgaaactggaccttcggaagaaggcagcatgtattgctgagcagtatcatactgtgttgaaactccaaggccaggtttctgccaaaaagcgccttggtaccaaccaggaaaatcagcaaccaaaccaacaaccaccagggaagaaaccattccttcgaaatttacttccccgaacaccaacctgccaaagctcaacagactgcagcccttatgcccggatcctacgctcacggcgttcccctttactcaaatctgggccttttggcaaaaagtactaaggctgtggggaaagagaagagcagtcatggccctgaggtgggtcagctactctcctgaagaaataggtctcttttatgctttaccatatatcaggaattatatccaggatgcaatactcagacactagcttttttctcacttttgtattataaccacctatgtaatctcatgttgttgtttttttttatttacttatatgatttctatgcacacaaaaacagttatattaaagatattattgttcacattttttattgaaaaaaaaaaaaaa

SEQ ID NO: 129 - DNA, 2097 bp, Homo sapiens
gggcgggcccaaggagggagtggaatggccgcgggcggctcgacgcagcagaggcgacgcgagatggcggcagcttcagcggcggcgatctcaggagctggtcgctgtcggctaagcaagattggagctactcgtcgtccacctccagctcgcgtaagggtggctgtgcgactgcggccatttgtggatggaacagcgggagcaagtgatcccccctgtgtgcggggcatggacagctgctctctagagattgctaactggaggaaccaccaggagactctcaaataccagtttgatgccttctatggggagaggagtactcagcaggacatctatgcaggttcagtgcagcccatcctaaggcacttgctggaagggcagaatgccagtgtgcttgcctatggacccacaggagctgggaagacgcacacaatgctgggcagcccagagcaacctggggtgatcccgcgggctctcatggacctcctgcagctcacaagggaggagggtgccgagggccggccatgggccctttctgtcaccatgtcttacctagagatctaccaggagaaggtattagacctcctggaccctgcttcgggagacctggtaatccgagaagactgccgggggaatatcctgattccgggtctctcccagaagcccatcagtagctttgctgattttgagcggcacttcctgccagccagtcgaaatcggactgtaggagccacccggctcaaccagcgctcctcccgcagtcatgctgtgctcctggtcaaggtggaccagcgggaacgtttggccccatttcgccagcgagagggaaaactctacctgattgacttggctgggtcagaggacaaccggcgcacaggcaacaagggccttcggctaaaagagagtggagccatcaacacctccctgtttgtcctgggcaaagtggtagatgcgctgaatcagggcctccctcgtgtaccttatcgggacagcaagctcactcgcctattgcaggactctctgggtggctcagcccacagtatccttattgccaacattgcccctgagagacgcttctacctagacacagtctccgcactcaactttgctgccaggtccaaggaggtgatcaatcggccttttaccaatgagagcctgcagcctcatgccttgggacctgttaagctgtctcagaaagaattgcttggtccaccagaggcaaagagagcccgaggccctgaggaagaggagattgggagccctgagcccatggcagctccagcctctgcctcccagaaactcagccccctacagaagctaagcagcatggacccggccatgctggagcgcctcctcagcttggaccgtctgcttgcctcccaggggagccagggggcccctctgttgagtaccccaaagcgagagcggatggtgctaatgaagacagtagaagagaaggacctagagattgagaggcttaagacgaagcaaaaagaactggaggccaagatgttggcccagaaggctgaggaaaaggagaaccattgtcccacaatgctccggcccctttcacatcgcacagtcacaggggcaaagcccctgaaaaaggctgtggtgatgcccctacagctaattcaggagcaggcagcatccccaaatgccgagatccacatcctgaagaataaaggccggaagagaaagctggagtccctggatgccctagagcctgaggagaaggctgaggactgctgggagctacagatcagcccggagctactggctcatgggcgccaaaaaatactggatctgctgaacgaaggctcagcccgagatctccgcagtcttcagcgcattggcccgaagaaggcccagctaatcgtgggctggcgggagctccacggccccttcagccaggtggaggacctggaacgcgtggagggcataacggggaaacagatggagtccttcctgaaggcaaacatcctgggtctcgccgccggccagcgctgtggcgcctcctgaccgtcgtctcctcactccgccttttcaaatttttgtataaccccgtgttgtgtaaatacagtttttgctccggtg

SEQ ID NO: 130 - DNA, 3636 bp, Homo sapiens
gcagagcaccgcgccttagccgcgaagttctagttcttgctgccggtcctaacgtcccgcagtcttcgccagccagccgtcccgcatgcgcgtttgggcggcgtggagcctgctgccatgaagtcagcgagagctaagacaccccggaaacctaccgtgaaaaaagggtcccaaacgaaccttaaagacccagttggggtatactgtagggtgcgcccactgggctttcctgatcaagagtgttgcatagaagtgatcaataatacaactgttcagcttcatactcctgagggctacagactcaaccgaaatggagactataaggagactcagtattcatttaaacaagtatttggcactcacaccacccagaaggaactctttgatgttgtggctaatcccttggtcaatgacctcattcatggcaaaaatggtcttctttttacatatggtgtgacgggaagtggaaaaactcacacaatgactggttctccaggggaaggagggctgcttcctcgttgtttggacatgatctttaacagtatagggtcatttcaagctaaacgatatgttttcaaatctaatgataggaatagtatggatatacagtgtgaggttgatgccttattagaacgtcagaaaagagaagctatgcccaatccaaagacttcttctagcaaacgacaagtagatccagagtttgcagatatgataactgtacaagaattctgcaaagcagaagaggttgatgaagatagtgtctatggtgtatttgtctcttatattgaaatatataataattacatatatgatctattggaagaggtgccgtttgatcccataaaacccaaacctccacaatctaaattgcttcgtgaagataagaaccataacatgtatgttgcaggatgtacagaagttgaagtgaaatctactgaggaggcttttgaagttttctggagaggccagaaaaagagacgtattgctaatacccatttgaatcgtgagtccagccgttcccatagcgtgttcaacattaaattagttcaggctcccttggatgcagatggagacaatgtcttacaggaaaaagaacaaatcactataagtcagttgtccttggtagatcttgctggaagtgaaagaactaaccggaccagagcagaagggaacagattacgtgaagctggtaatattaatcagtcactaatgacgctaagaacatgtatggatgtcctaagagagaaccaaatgtatggaactaacaagatggttccatatcgagattcaaagttaacccatctgttcaagaactactttgatggggaaggaaaagtgcggatgatcgtgtgtgtgaaccccaaggctgaagattatgaagaaaacttgcaagtcatgagatttgcggaagtgactcaagaagttgaagtagcaagacctgtagacaaggcaatatgtggtttaacgcctgggaggagatacagaaaccagcctcgaggtccagttggaaatgaaccattggttactgacgtggttttgcagagttttccacctttgccgtcatgcgaaattttggatatcaacgatgagcagacacttccaaggctgattgaagccttagagaaacgacataacttacgacaaatgatgattgatgagtttaacaaacaatctaatgcttttaaagctttgttacaagaatttgacaatgctgttttaagtaaagaaaaccacatgcaagggaaactaaatgaaaaggagaagatgatctcaggacagaaattggaaatagaacgactggaaaagaaaaacaaaactttagaatataagattgagattttagagaaaacaactactatctatgaggaagataaacgcaatttgcaacaggaacttgaaactcagaaccagaaacttcagcgacagttttctgacaaacgcagattagaagccaggttgcaaggcatggtgacagaaacgacaatgaagtgggagaaagaatgtgagcgtagagtggcagccaaacagctggagatgcagaataaactctgggttaaagatgaaaagctgaaacaactgaaggctattgttactgaacctaaaactgagaagccagagagaccctctcgggagcgagatcgagaaaaagttactcaaagatctgtttctccatcacctgtgcctctttctagtaactatattgctcagatttccaacggccagcaactcatgagccagccacagctacataggcgctctaactcttgcagcagcatttctgtagcttcctgtatttcggaatgggagcagaaaattcctacgtacaacacacctctcaaagtcacatctattgcaaggcgtaggcagcaggagccaggacaaagcaaaacttgtatcgtgtcagacagaaggcgagggatgtactggactgaaggcagggaggtggttcctacattcagaaatgagatagaaatagaagaggatcattgcggcaggttactctttcaacctgatcagaacgcaccaccaattcgtctccgacacagacgatcacgctctgcaggagacagatgggtagatcataagcccgcctctaacatgcaaactgaaacagtcatgcagccacatgtccctcatgccatcacagtatctgttgcaaatgaaaaggcactagctaagtgtgagaagtacatgctgacccaccaggaactagcctccgatggggagattgaaactaaactaattaagggtgatatttataaaacaaggggtggtggacaatctgttcagtttactgatattgagactttaaagcaagaatcaccaaatggtagtcgaaaacgaagatcttccacagtagcacctgcccaaccagatggtgcagagtctgaatggaccgatgtagaaacaaggtgttctgtggctgtggagatgagagcaggatcccagctgggacctggatatcagcatcacgcacaacccaagcgcaaaaagccatgaactgacagtcccagtactgaaagaacattttcatttgtgtggatgatttctcgaaagccatgccagaagcagtcttccaggtcatcttgtagaactccagctttgttgaaaatcacggacctcagctacatcatacactgacccagagcaaagctttccctatggttccaaagacaactagtattcaacaaaccttgtatagtatatgttttgccatatttaatattaatagcagaggaagactccttttttcatcactgtatgaattttttataatgtttttttaaaatatatttcatgtatacttataaactaattcacacaagtgtttgtcttagatgattaaggaagactatatctagatcatgtctgattttttattgtgacttctccagccctggtctgaatttcttaaggttttataaacaaatgctgctatttattagctgcaagaatgcactttagaactatttgacaattcagactttcaaaataaagatgtaaatgactggccaataataaccattttaggaaggtgttttgaattctgtatgtatatattcactttctgacatttagatatgccaaaagaattaaaatcaaaagcactaagaaataaaaaaaaaaaaaaaaaaa

SEQ ID NO: 131 - DNA, 2825 bp, Homo sapiens
gcgaaattgaggtttcttggtattgcgcgtttctcttccttgctgactctccgaatggccatggactcgtcgcttcaggcccgcctgtttcccggtctcgctatcaagatccaacgcagtaatggtttaattcacagtgccaatgtaaggactgtgaacttggagaaatcctgtgtttcagtggaatgggcagaaggaggtgccacaaagggcaaagagattgattttgatgatgtggctgcaataaacccagaactcttacagcttcttcccttacatccgaaggacaatctgcccttgcaggaaaatgtaacaatccagaaacaaaaacggagatccgtcaactccaaaattcctgctccaaaagaaagtcttcgaagccgctccactcgcatgtccactgtctcagagcttcgcatcacggctcaggagaatgacatggaggtggagctgcctgcagctgcaaactcccgcaagcagttttcagttcctcctgcccccactaggccttcctgccctgcagtggctgaaataccattgaggatggtcagcgaggagatggaagagcaagtccattccatccgtggcagctcttctgcaaaccctgtgaactcagttcggaggaaatcatgtcttgtgaaggaagtggaaaaaatgaagaacaagcgagaagagaagaaggcccagaactctgaaatgagaatgaagagagctcaggagtatgacagtagttttccaaactgggaatttgcccgaatgattaaagaatttcgggctactttggaatgtcatccacttactatgactgatcctatcgaagagcacagaatatgtgtctgtgttaggaaacgcccactgaataagcaagaattggccaagaaagaaattgatgtgatttccattcctagcaagtgtctcctcttggtacatgaacccaagttgaaagtggacttaacaaagtatctggagaaccaagcattctgctttgactttgcatttgatgaaacagcttcgaatgaagttgtctacaggttcacagcaaggccactggtacagacaatctttgaaggtggaaaagcaacttgttttgcatatggccagacaggaagtggcaagacacatactatgggcggagacctctctgggaaagcccagaatgcatccaaagggatctatgccatggcctcccgggacgtcttcctcctgaagaatcaaccctgctaccggaagttgggcctggaagtctatgtgacattcttcgagatctacaatgggaagctgtttgacctgctcaacaagaaggccaagctgcgcgtgctggaggacggcaagcaacaggtgcaagtggtggggctgcaggagcatctggttaactctgctgatgatgtcatcaagatgctcgacatgggcagcgcctgcagaacctctgggcagacatttgccaactccaattcctcccgctcccacgcgtgcttccaaattattcttcgagctaaagggagaatgcatggcaagttctctttggtagatctggcagggaatgagcgaggcgcagacacttccagtgctgaccggcagacccgcatggagggcgcagaaatcaacaagagtctcttagccctgaaggagtgcatcagggccctgggacagaacaaggctcacaccccgttccgtgagagcaagctgacacaggtgctgagggactccttcattggggagaactctaggacttgcatgattgccacgatctcaccaggcataagctcctgtgaatatactttaaacaccctgagatatgcagacagggtcaaggagctgagcccccacagtgggcccagtggagagcagttgattcaaatggaaacagaagagatggaagcctgctctaacggggcgctgattccaggcaatttatccaaggaagaggaggaactgtcttcccagatgtccagctttaacgaagccatgactcagatcagggagctggaggagaaggctatggaagagctcaaggagatcatacagcaaggaccagactggcttgagctctctgagatgaccgagcagccagactatgacctggagacctttgtgaacaaagcggaatctgctctggcccagcaagccaagcatttctcagccctgcgagatgtcatcaaggccttacgcctggccatgcagctggaagagcaggctagcagacaaataagcagcaagaaacggccccagtgacgactgcaaataaaaatctgtttggtttgacacccagcctcttccctggccctccccagagaactttgggtacctggtgggtctaggcagggtctgagctgggacaggttctggtaaatgccaagtatgggggcatctgggcccagggcagctggggagggggtcagagtgacatgggacactccttttctgttcctcagttgtcgccctcacgagaggaaggagctcttagttacccttttgtgttgcccttctttccatcaaggggaatgttctcagcatagagctttctccgcagcatcctgcctgcgtggactggctgctaatggagagctccctggggttgtcctggctctggggagagagacggagcctttagtacagctatctgctggctctaaaccttctacgcctttgggccgagcactgaatgtcttgtactttaaaaaaatgtttctgagacctctttctactttactgtctccctagagtcctagaggatccctactgttttctgttttatgtgtttatacattgtatgtaacaataaagagaaaaaataaaaaaaaaaaaaaaaaaaaaaaaaaaaaaaa

SEQ ID NO: 132 - DNA, 2150 bp, Homo sapiens
ctcgagccacgaaggccccgctgtcctgtctagcagatacttgcacggtttacagaaattcggtccctgggtcgtgtcaggaaactggaaaaaaggtcataagcatgaagcgcagttcagtttccagcggtggtgctggccgcctctccatgcaggagttaagatcccaggatgtaaataaacaaggcctctatacccctcaaaccaaagagaaaccaacctttggaaagttgagtataaacaaaccgacatctgaaagaaaagtctcgctatttggcaaaagaactagtggacatggatcccggaatagtcaacttggtatattttccagttctgagaaaatcaaggacccgagaccacttaatgacaaagcattcattcagcagtgtattcgacaactctgtgagtttcttacagaaaatggttatgcacataatgtgtccatgaaatctctacaagctccctctgttaaagacttcctgaagatcttcacatttctttatggcttcctgtgcccctcatacgaacttcctgacacaaagtttgaagaagaggttccaagaatctttaaagaccttgggtatccttttgcactatccaaaagctccatgtacacagtgggggctcctcatacatggcctcacattgtggcagccttagtttggctaatagactgcatcaagatacatactgccatgaaagaaagctcacctttatttgatgatgggcagccttggggagaagaaactgaagatggaattatgcataataagttgtttttggactacaccataaaatgctatgagagttttatgagtggtgccgacagctttgatgagatgaatgcagagctgcagtcaaaactgaaggatttatttaatgtggatgcttttaagctggaatcattagaagcaaaaaacagagcattgaatgaacagattgcaagattggaacaagaaagagaaaaagaaccgaatcgtctagagtcgttgagaaaactgaaggcttccttacaaggagatgttcaaaagtatcaggcatacatgagcaatttggagtctcattcagccattcttgaccagaaattaaatggtctcaatgaggaaattgctagagtagaactagaatgtgaaacaataaaacaggagaacactcgactacagaatatcattgacaaccagaagtactcagttgcagacattgagcgaataaatcatgaaagaaatgaattgcagcagactattaataaattaaccaaggacctggaagctgaacaacagaagttgtggaatgaggagttaaaatatgccagaggcaaagaagcgattgaaacacaattagcagagtatcacaaattggctagaaaattaaaacttattcctaaaggtgctgagaattccaaaggttatgactttgaaattaagtttaatcccgaggctggtgccaactgccttgtcaaatacagggctcaagtttatgtacctcttaaggaactcctgaatgaaactgaagaagaaattaataaagccctaaataaaaaaatgggtttggaggatactttagaacaattgaatgcaatgataacagaaagcaagagaagtgtgagaactctgaaagaagaagttcaaaagctggatgatctttaccaacaaaaaattaaggaagcagaggaagaggatgaaaaatgtgccagtgagcttgagtccttggagaaacacaagcacctgctagaaagtactgttaaccaggggctcagtgaagctatgaatgaattagatgctgttcagcgggaataccaactagttgtgcaaaccacgactgaagaaagacgaaaagtgggaaataacttgcaacgtctgttagagatggttgctacacatgttgggtctgtagagaaacatcttgaggagcagattgctaaagttgatagagaatatgaagaatgcatgtcagaagatctctcggaaaatattaaagagattagagataagtatgagaagaaagctactctaattaagtcttctgaagaatgaagataaaatgttgatcatgtatatatatccatagtgaataaaattgtctcagtaaaaaaaaaaaaaaaaaaaaaaaaaaaaaaaaaaaaaaaaaaaaaaaaaaaaaaaaaaaaaaaa

SEQ ID NO: 133 - DNA, 1868 bp, Homo sapiens
ccgattcctggcttttgcaaggctgtggtcggtggtcatcagtgctcttgacccaggtccagcgagccttttccctggtgttgcagctgttgttgtaccgccgccgtcgccgccgtcgccgcctgctctgcggggtcatggtgtgcttccgcctcttcccggttccgggctcagggctcgttctggtctgcctagtcctgggagctgtgcggtcttatgcattggaacttaatttgacagattcagaaaatgccacttgcctttatgcaaaatggcagatgaatttcacagtacgctatgaaactacaaataaaacttataaaactgtaaccatttcagaccatggcactgtgacatataatggaagcatttgtggggatgatcagaatggtcccaaaatagcagtgcagttcggacctggcttttcctggattgcgaattttaccaaggcagcatctacttattcaattgacagcgtctcattttcctacaacactggtgataacacaacatttcctgatgctgaagataaaggaattcttactgttgatgaacttttggccatcagaattccattgaatgacctttttagatgcaatagtttatcaactttggaaaagaatgatgttgtccaacactactgggatgttcttgtacaagcttttgtccaaaatggcacagtgagcacaaatgagttcctgtgtgataaagacaaaacttcaacagtggcacccaccatacacaccactgtgccatctcctactacaacacctactccaaaggaaaaaccagaagctggaacctattcagttaataatggcaatgatacttgtctgctggctaccatggggctgcagctgaacatcactcaggataaggttgcttcagttattaacatcaaccccaatacaactcactccacaggcagctgccgttctcacactgctctacttagactcaatagcagcaccattaagtatctagactttgtctttgctgtgaaaaatgaaaaccgattttatctgaaggaagtgaacatcagcatgtatttggttaatggctccgttttcagcattgcaaataacaatctcagctactgggatgcccccctgggaagttcttatatgtgcaacaaagagcagactgtttcagtgtctggagcatttcagataaatacctttgatctaagggttcagcctttcaatgtgacacaaggaaagtattctacagctcaagactgcagtgcagatgacgacaacttccttgtgcccatagcggtgggagctgccttggcaggagtacttattctagtgttgctggcttattttattggtctcaagcaccatcatgctggatatgagcaattttagaatctgcaacctgattgattatataaaaatacatgcaaataacaagattttcttacctctcagttgttgaaacactttgcttcttaaaattgatatgttgaaactttaattcttttatcaatcccagcattttgagatcagtctttattaataaaacctgttctctttaatcagcttaaaatccaaagtgtcatatttactggtcctggagacaaacttgttcaaaagaacatcaacgtgcaatgttttaaggtctatcttaagaagccctggccaaattttgatcctaaccttgaagtatgccttgaacttattaacatggccattataagaataaaatatgtagttgtgtcttaatggaattaataaatgtcatttcactactggtgttctgttttcaatgtataaggactatagtgatttaaactcatcaatgtgcctttgcataaagttgattaaataaatattgatgtggtataaatgcccatcagatatgct

SEQ ID NO: 134 - DNA, 2199 bp, Homo sapiens
acgtgatccacccgcctcggcctcccaaagtttttggattacaggtgtgagccacctcgcccggtcctatctctctttcttctctttctccctctcactttgtttctcttctctctctctctcccgcctccttcccccgtctcccctcccttccccccaccgccctcttcatagctgagcctgtccggcagtgcggcggatgtacggatgattcagtggctggcaggaagcccgccctgcccgcccgccagtgtcagtggtgttggcatcagcttgggcaggtgtgcgggctcaggatggggcggccgtggtgaggaaccctggactctcagagatggaatttcaccgtgttgcctaggctggtctggagctcttgatctcaagcgatcctccctgcctcggcctcccaacgtgctgggattataggcgtgagccaccgctcctggccagggtctgttcctagttgcaacagttcttggaaacccactcgagagggccacgcctccattcaccaggccacgcatcacaagaggcaacaccaggagccaacatgagctcggggactgaactgctgtggcccggagcagcgctgctggtgctgttgggggtggcagccagtctgtgtgtgcgctgctcacgcccaggtgcaaagaggtcagagaaaatctaccagcagagaagtctgcgtgaggaccaacagagctttacggggtcccggacctactccttggtcgggcaggcatggccaggacccctggcggacatggcacccacaaggaaggacaagctgttgcaattctaccccagcctggaggatccagcatcttccaggtaccagaacttcagcaaaggaagcagacacgggtcggaggaagcctacatagaccccattgccatggagtattacaactgggggcggttctcgaagcccccagaagatgatgatgccaattcctacgagaatgtgctcatttgcaagcagaaaaccacagagacaggtgcccagcaggagggcataggtggcctctgcagaggggacctcagcctgtcactggccctgaagactggccccacttctggtctctgtccctctgcctccccggaagaagatgaggaatctgaggattatcagaactcagcatccatccatcagtggcgcgagtccaggaaggtcatggggcaactccagagagaagcatcccctggcccggtgggaagcccagacgaggaggacggggaaccggattacgtgaatggggaggtggcagccacagaagcctagggcagaccaagaagaaaggagccaaggcaaagagggaccactgtgctcatggacccatcgctgccttccaaggaccatttcccagagctactcaacttttaagcccctgccatggttgctcctggaaggagaaccagccaccctgaggaccacctggccatgcgtgcacagcctgggaaaagacagttactcacgggagctgcaggcccgtcaccaagccctctcccgacccaggctttgtggggcaggcacctggtaccaagggtaacccggctcctggtatggacggatgcgcaggatttaggataagctgtcacccagtccccataacaaaaccactgtccaacactggtatctgtgttcttttgtgctatgaatttggattcctaattgctattgttggttgctggggttttaaatgattgataagcttgtacagttaacttatagagggggagccatatttaacattctggatttcagagtagagatttctgtgttgtctcctagaaagcattacatgtagtttatttcagcatccttgttgggtggggccctggctctcttcccctttggtgggacctcccctttctttgggcttcagttcactcaggaagaaatgaggctgtcgccatctttatgtgcttccagtggaaatgtcacttgctacagacaatagtgcatgagagtctagagaagtagtgaccagaacagggcagagtaggtcccctccatggccctgaatcctcctctgctccagggctggcctctgcagagctgattaaacagtgttgtgactgtctcatgggaagagctggggcccagagggaccttgagtcagaaatgttgccagaaaaagtatctcctccaaccaaaacatctcaataaaaccattttagttgaaaagcaaaaaaaaa

SEQ ID NO: 135 - DNA, 3083 bp, Homo sapiens
cagaggcgcgcctggcggatctgagtgtgttgcccgggcagcggcgcgcgggaccaacgcaaggagcagctgacagacgaagaaaagtgctggacaggaagggagaattctgacgccaacatgcagcgaagtatcatgtcatttttccaccccaagaaagagggtaaagcaaagaagcctgagaaggaggcatccaatagcagcagagagacggagccccctccaaaggcggcactgaaggagtggaatggagtggtgtccgagagtgactctccggtgaagaggccagggaggaaggcggcccgggtcctgggcagcgaaggggaagaggaggatgaagcccttagccctgctaaaggccagaagcctgccctggactgctcacaggtctccccgccccgtcctgccacatctcctgagaacaatgcttccctctctgacacctctcccatggacagttccccatcagggattccgaagcgtcgcacagctcggaagcagctcccgaaacggaccattcaggaagtcctggaagagcagagtgaggacgaggacagagaagccaagaggaagaaggaggaggaagaagaggagaccccgaaagaaagcctcacagaggctgaagtggcaacagagaaggaaggagaagacggggaccagcccaccacgcctcccaagcccctaaagacctccaaagcagagaccccgacggaaagcgtttcagagcctgaggtggccacgaagcaggaactgcaggaggaggaagagcagaccaagcctccccgcagagctcccaagacgctcagcagcttcttcaccccccggaagccagcagtcaaaaaagaagtgaaggaagaggagccaggggctccaggaaaggagggagctgctgagggacccctggatccatctggttacaatcctgccaagaacaactatcatcccgtggaagatgcctgctggaaaccgggccagaaggttccttacctggctgtggcccggacgtttgagaagatcgaggaggtgtctgctcggctccggatggtggagacgctgagcaacttgctgcgctccgtggtggccctgtcgcctccagacctcctccctgtcctctacctcagcctcaaccaccttgggccaccccagcagggcctggagcttggcgtgggtgatggtgtccttctcaaggcagtggcccaggccacaggtcggcagctggagtccgtccgggctgaggcagccgagaaaggcgacgtggggctggtggccgagaacagccgcagcacccagaggctcatgctgccaccacctccgctcactgcctccggggtcttcagcaagttccgcgacatcgccaggctcactggcagtgcttccacagccaagaagatagacatcatcaaaggcctctttgtggcctgccgccactcagaagcccggttcatcgctaggtccctgagcggacggctgcgccttgggctggcagagcagtcggtgctggctgccctctcccaggcagtgagcctcacgcccccgggccaagaattcccaccagccatggtggatgctgggaagggcaagacagcagaggccagaaagacgtggctggaggagcaaggcatgatcctgaagcagacgttctgcgaggttcccgacctggaccgaattatccccgtgctgctggagcacggcctggaacgtctcccggagcactgcaagctgagcccagggattcccctgaaaccaatgttggcccatcccacccggggcatcagcgaggtcctgaaacgctttgaggaggcagctttcacctgcgaatacaaatatgacgggcagagggcacagatccacgccctggaaggcggggaggtgaagatcttcagcaggaatcaggaagacaacactgggaagtacccggacatcatcagccgcatccccaagattaaactcccatcggtcacatccttcatcctggacaccgaagccgtggcttgggaccgggaaaagaagcagatccagccattccaagtgctcaccacccgcaaacgcaaggaggtggatgcgtctgagatccaggtgcaggtgtgtttgtacgccttcgacctcatctacctcaatggagagtccctggtacgtgagcccctttcccggcgccggcagctgctccgggagaactttgtggagacagagggcgagtttgtcttcgccacctccctggacaccaaggacatcgagcagatcgccgagttcctggagcagtcagtgaaagactcctgcgaggggctgatggtgaagaccctggatgttgatgccacctacgagatcgccaagagatcgcacaactggctcaagctgaagaaggactaccttgatggcgtgggtgacaccctggacctggtggtgatcggcgcctacctgggccgggggaagcgggccggccggtacgggggcttcctgctggcctcctacgacgaggacagtgaggagctgcaggccatatgcaagcttggaactggcttcagtgatgaggagctggaggagcatcaccagagcctcaaggcgctggtgctgcccagcccacgcccttacgtgcggatagatggcgctgtgattcccgaccactggctggaccccagcgctgtgtgggaggtgaagtgcgctgacctctccctctctcccatctaccctgctgcgcggggcctggtggatagtgacaagggcatctcccttcgcttccctcggtttattcgagtccgtgaagacaagcagccggagcaggccaccaccagtgctcaggtggcctgtttgtaccggaagcaaagtcagattcagaaccaacaaggcgaggactcaggctctgaccctgaagatacctactaagccctcgccctcctagggcctgggtacagggcatgagttggacggaccccagggttattattgcctttgctttttagcaaatctgctgtggcaggctgtggattttgagagtcaggggaggggtgtgtgtgtgagggggtggcttactccggagtctgggattcatcccgtcatttctttcaataaataattattggatagct

SEQ ID NO: 136 - DNA, 4143 bp, Homo sapiens
agcagcgagtccttgcctcccggcggctcaggacgagggcagatctcgttctggggcaagccgttgacactcgctccctgccaccgcccgggctccgtgccgccaagttttcattttccaccttctctgcctccagtcccccagcccctggccgagagaagggtcttaccggccgggattgctggaaacaccaagaggtggtttttgttttttaaaacttctgtttcttgggagggggtgtggcggggcaggatgagcaactccgttcctctgctctgtttctggagcctctgctattgctttgctgcggggagccccgtaccttttggtccagagggacggctggaagataagctccacaaacccaaagctacacagactgaggtcaaaccatctgtgaggtttaacctccgcacctccaaggacccagagcatgaaggatgctacctctccgtcggccacagccagcccttagaagactgcagtttcaacatgacagctaaaacctttttcatcattcacggatggacgatgagcggtatctttgaaaactggctgcacaaactcgtgtcagccctgcacacaagagagaaagacgccaatgtagttgtggttgactggctccccctggcccaccagctttacacggatgcggtcaataataccagggtggtgggacacagcattgccaggatgctcgactggctgcaggagaaggacgatttttctctcgggaatgtccacttgatcggctacagcctcggagcgcacgtggccgggtatgcaggcaacttcgtgaaaggaacggtgggccgaatcacaggtttggatcctgccgggcccatgtttgaaggggccgacatccacaagaggctctctccggacgatgcagattttgtggatgtcctccacacctacacgcgttccttcggcttgagcattggtattcagatgcctgtgggccacattgacatctaccccaatgggggtgacttccagccaggctgtggactcaacgatgtcttgggatcaattgcatatggaacaatcacagaggtggtaaaatgtgagcatgagcgagccgtccacctctttgttgactctctggtgaatcaggacaagccgagttttgccttccagtgcactgactccaatcgcttcaaaaaggggatctgtctgagctgccgcaagaaccgttgtaatagcattggctacaatgccaagaaaatgaggaacaagaggaacagcaaaatgtacctaaaaacccgggcaggcatgcctttcagagtttaccattatcagatgaaaatccatgtcttcagttacaagaacatgggagaaattgagcccaccttttacgtcaccctttatggcactaatgcagattcccagactctgccactggaaatagtggagcggatcgagcagaatgccaccaacaccttcctggtctacaccgaggaggacttgggagacctcttgaagatccagctcacctgggagggggcctctcagtcttggtacaacctgtggaaggagtttcgcagctacctgtctcaaccccgcaaccccggacgggagctgaatatcaggcgcatccgggtgaagtctggggaaacccagcggaaactgacattttgtacagaagaccctgagaacaccagcatatccccaggccgggagctctggtttcgcaagtgtcgggatggctggaggatgaaaaacgaaaccagtcccactgtggagcttccctgagggtgcccgggcaagtcttgccagcaaggcagcaagacttcctgctatccaagcccatggaggaaagttactgctgaggacccacccaatggaaggattcttctcagccttgaccctggagcactgggaacaactggtctcctgtgatggctgggactcctcgcgggaggggactgcgctgctatagctcttgctgcctctcttgaatagctctaactccaaacctctgtccacacctccagagcaccaagtccagatttgtgtgtaagcagctgggtgcctggggcctctcgtgcacactggattggtttctcagttgctgggcgagcctgtactctgcctgacgaggaacgctggctccgaagaggccctgtgtagaaggctgtcagctgctcagcctgctttgagcctcagtgagaagtccttccgacaggagctgactcatgtcaggatggcaggcctggtatcttgctcgggccctagctgttggggttctcatgggttgcactgaccatactgcttacgtcttagccattccgtcctgctccccagctcactctctgaagcacacatcattggctttcctatttttctgttcattttttaattgagcaaatgtctattgaacacttaaaattaattagaatgtggtaatggacatattactgagcctctccatttggaacccagtggagttgggatttctagaccctctttctgtttggatggtgtatgtgtatatgcatggggaaaggcacctggggcctgggggaggctataggatataagcattagggaccctgaggctttaagtggtttctatttcttcttagttattatgtgccaccttcttagttattatgtgccacctcccctatgagtgacgtgtttgatcactagcagaatagcaagcagagtatcattcatgctggggccagaatgatggccggttgccagatataactgctttggagcaaatctcttctgtttagagagatagaagttatgacatatgtaatacacatctgtgtacacagaaaccggcacctgccagacagagctggttctaagatttaatacagtgctttttttcctctttgaaatattttactttaataccagtgccttttcttgttgaacttcttggaaaagccaccaattctagatcttgatttgaattaatacacacaatatctgagacacttacacttttcaaaagatttgtgtatgcattgcctaattagagtagggggagaagggcaactattattatccctattttacaaaactgaggcttagtgaggttcagccacatgcctagacttatatactagttagtggtgcagccagggagaggactcagatttcctggaggcaaagtctatctctgaaactccatgaagacttttgcagccagttcccaccaatatgccccagacgtgagacaaacaaggacttttttttttatatagagccatccataaaatcctaagcccttttattaatgtataaccaggagaacatctgtgccaacggttggactttttatggctgagattcgggaggaagtgtgacaccaagcaggagaggaagaatgattttctttgtacttaggttttctaaggacattgttttaatctgtatcgtgccaaagttgtatcactgttaaacttctgaagacataaccagttgagtcttatttcaagatatgttctcaagccaattgtgtgcttctcttgtttctgtgattgctttctagccaaagcgaagcttgtacaggttgagtatcccttatccaaaatgcttggaaccagaagtgtttcaaattttagattattttcagattttggaatgtttgcatatacataatgagatattttgggaataggacccgagcctaaacacaaaattcattgatgtgtcagttacaccttatccacatagcctgagggtaattttatacgatattttaaatagttgtgtacatgaagcatggtttgtggtaacttatgtgaggggttttcccattttttgtcttgttggtgctcaaaaagttttggattttggagcatttcggattttggatttttggattagggttgctcaacccatattattggctgtacatcctggtcacttctgacttctgtttttactaatggaagctttgcaaattgaattctcagtgagttgtatatttatacacctggcttgaagccttaattgtatataatgatgctttttaaaaaatgctatttggaagactatttatttctcgtgtatataatgtatataaaaaaatatggttagtgtttacctaaggttaaccaatttcaagattaaaatttttaaatagtaaaataataaaaaattataaagttcttaaaa

SEQ ID NO: 137 - DNA, 4528 bp, Homo sapiens
gccggggcgggcggcagcggcggcggcggcggcggcgggggcagcggcaaccccggcgccgcggcaaggactcggagggctgagacgcggcggcggcggcgcggggagcgcggggcgcggcggccggagccccgggcccgccatgggcctccccgagccgggccctctccggcttctggcgctgctgctgctgctgctgctgctgctgctgctgcagctccagcatcttgcggcggcagcggctgatccgctgctcggcggccaagggccggccaaggattgcgaaaaggaccaattccagtgccggaacgagcgctgcatcccctctgtgtggagatgcgacgaggacgatgactgcttagaccacagcgacgaggacgactgccccaagaagacctgtgcagacagtgacttcacctgtgacaacggccactgcatccacgaacggtggaagtgtgacggcgaggaggagtgtcctgatggctccgatgagtccgaggccacttgcaccaagcaggtgtgtcctgcagagaagctgagctgtggacccaccagccacaagtgtgtacctgcctcgtggcgctgcgacggggagaaggactgcgagggtggagcggatgaggccggctgtgctaccttgtgcgccccgcacgagttccagtgcggcaaccgctcgtgcctggccgccgtgttcgtgtgcgacggcgacgacgactgtggtgacggcagcgatgagcgcggctgtgcagacccggcctgcgggccccgcgagttccgctgcggcggcgatggcggcggcgcctgcatcccggagcgctgggtctgcgaccgccagtttgactgcgaggaccgctcggacgaggcagccgagctctgcggccgtccgggccccggggccacgtccgcgcccgccgcctgcgccaccgcctcccagttcgcctgccgcagcggcgagtgcgtgcacctgggctggcgctgcgacggcgaccgcgactgcaaagacaaatcggacgaggccgactgcccactgggcacctgccgtggggacgagttccagtgtggggatgggacatgtgtccttgcaatcaagcactgcaaccaggagcaggactgtccagatgggagtgatgaagctggctgcctacaggggctgaacgagtgtctgcacaacaatggcggctgctcacacatctgcactgacctcaagattggctttgaatgcacgtgcccagcaggcttccagctcctggaccagaagacctgtggcgacattgatgagtgcaaggacccagatgcctgcagccagatctgtgtcaattacaagggctattttaagtgtgagtgctaccctggctacgagatggacctactgaccaagaactgcaaggctgctgctggcaagagcccatccctaatcttcaccaaccggcacgaggtgcggaggatcgacctggtgaagcggaactattcacgcctcatccccatgctcaagaatgtcgtggcactagatgtggaagttgccaccaatcgcatctactggtgtgacctctcctaccgtaagatctatagcgcctacatggacaaggccagtgacccgaaagagcaggaggtcctcattgacgagcagttgcactctccagagggcctggcagtggactgggtccacaagcacatctactggactgactcgggcaataagaccatctcagtggccacagttgatggtggccgccgacgcactctcttcagccgtaacctcagtgaaccccgggccatcgctgttgaccccctgcgagggttcatgtattggtctgactggggggaccaggccaagattgagaaatctgggctcaacggtgtggaccggcaaacactggtgtcagacaatattgaatggcccaacggaatcaccctggatctgctgagccagcgcttgtactgggtagactccaagctacaccaactgtccagcattgacttcagtggaggcaacagaaagacgctgatctcctccactgacttcctgagccacccttttgggatagctgtgtttgaggacaaggtgttctggacagacctggagaacgaggccattttcagtgcaaatcggctcaatggcctggaaatctccatcctggctgagaacctcaacaacccacatgacattgtcatcttccatgagctgaagcagccaagagctccagatgcctgtgagctgagtgtccagcctaatggaggctgtgaatacctgtgccttcctgctcctcagatctccagccactctcccaagtacacatgtgcctgtcctgacacaatgtggctgggtccagacatgaagaggtgctaccgagcacctcaatctacctcaactacgacgttagcttctaccatgacgaggacagtacctgccaccacaagagcccccgggaccaccgtccacagatccacctaccagaaccacagcacagagacaccaagcctgacagctgcagtcccaagctcagttagtgtccccagggctcccagcatcagcccgtctaccctaagccctgcaaccagcaaccactcccagcactatgcaaatgaagacagtaagatgggctcaacagtcactgccgctgttatcgggatcatcgtgcccatagtggtgatagccctcctgtgcatgagtggatacctgatctggagaaactggaagcggaagaacaccaaaagcatgaattttgacaacccagtctacaggaaaacaacagaagaagaagacgaagatgagctccatatagggagaactgctcagattggccatgtctatcctgcagcaatcagcagctttgatcgcccactgtgggcagagccctgtcttggggagaccagagaaccggaagacccagcccctgccctcaaggagctttttgtcttgccgggggaaccaaggtcacagctgcaccaactcccgaagaaccctctttccgagctgcctgtcgtcaaatccaagcgagtggcattaagccttgaagatgatggactaccctgaggatgggatcacccccttcgtgcctcatggaattcagtcccatgcactacactctggatggtgtatgactggatgaatgggtttctatatatgggtctgtgtgagtgtatgtgtgtgtgtgattttttttttaaatttatgttgcggaaaggtaaccacaaagttatgatgaactgcaaacatccaaaggatgtgagagtttttctatgtataatgttttatacactttttaactggttgcactacccatgaggaattcgtggaatggctactgctgactaacatgatgcacataaccaaatgggggccaatggcacagtaccttactcatcatttaaaaactatatttacagaagatgtttggttgctgggggggcttttttaggttttggggcatttgttttttgtaaataagatgattatgctttgtggctatccatcaacataagtaaaaaaaaaaaaaaaacacttcaactccctcccccatttagattatttattaacatattttaaaaatcagatgagttctataaataatttagagaagtgagagtatttatttttggcatgtttggcccaccacacagactctgtgtgtgtatgtgtgtgtttatatgtgtatgtgtgtgacagaaaaatctgtagagaagaggcacatctatggctactgttcaaatacataaagataaatttattttcacacagtccacaaggggtatatcttgtagttttcagaaaagcctttggaaatctggatcagaaaatagataccatggtttgtgcaattatgtagtaaaaaaggcaaatcttttcacctctggctattcctgagaccccaggaagtcaggaaaagcctttcagctcacccatggctgctgtgactcctaccagggctttcttggctttggcgaaggtcagtgtacagacattccatggtaccagagtgctcagaaactcaagataggatatgcctcaccctcagctactccttgttttaaagttcagctctttgagtaacttcttcaatttctttcaggacacttgggttgaattcagtaagtttcctctgaagcaccctgaagggtgccatccttacagagctaagtggagacgtttccagatcagcccaagtttactatagagactggcccaggcactgaatgtctaggacatgctgtggatgaagataaagatggtggaataggttttatcacatctcttatttctcttttccccttactctctaccatttcctttatgtggggaaacattttaaggtaataaataggttacttaccatcatatgttcatatagatgaaactaatttttggcttaagtcagaacaactggccaaaattgaagtcatatttgaggggggaaatggcatacgcaatattatattatattggatatttatgttcacacaggaatttggtttactgctttgtaaataaaaggaaaaactccgggtaaaaaaaaaaaaaaaaaaaaaa

SEQ ID NO: 138 - DNA, 1130 bp, Homo sapiens
gcacgagggtgctgactggcttgcgtctctgccactttctttcagcttagtggcgcgcggcgcgcgacgaccgccgggagcgtgtgcagcggcggcggcggaagtggccggcgagcccggtccccgccggcaccatgcttcccttgtcactgctgaagacggctcagaatcaccccatgttggtggagctgaaaaatggggagacgtacaatggacacctggtgagctgcgacaactggatgaacattaacctgcgagaagtcatctgcacgtccagggacggggacaagttctggcggatgcccgagtgctacatccgcggcagcaccatcaagtacctgcgcatccccgacgagatcatcgacatggtcaaggaggaggtggtggccaagggccgcggccgcggaggcttgcagcagcagaagcagcagaaaggccgcggcatgggcggcgctggccgaggtgtgtttggtggccggggccgaggtgggatcccgggcacaggcagaggccagccagagaagaagcctggcagacaggcgggcaaacagtgagcgcccacccagaccggctgctgcgccccctcctgccagggtggcgattccgctccacagtctcggacggatctgctcagaaaggaagaggcaggcgccagggggaacccccttcgtgttttgtgaccctcccttttaggtgaagcccctttttcttgctaaaaccggcaattctccggttagaaatgttacttggtgttttttggttttgtgaaacggccgtcccaaagctggctggattcctagaagagtctgtgttgaaggcatctttcaagccctcgctctggttctcagggcagcattttccaggcgggtttgttttgcatttcttggagcctctccgagcagcaaccagacgggagatttttattttaagctgttcatgctgggactgacagcctgcagggtttccttgggcgcggccccaaaattgccttcaaaacaaacccgggacggttgaaagccttcgaaccgtgcaggggatgcctcgggccctggcccttcgcttcctctcttgtgttatggaaataaaaacaaataaaactacacactgcacaaaaaaaaaaaaaaaaaaaa

SEQ ID NO: 139 - DNA, 5324 bp, Homo sapiens
ggggcccgtctggggcgccggcgggtgcgtttgaatctggtccgagcgcgggaaacggcgggtccccgagcccagggttacaaaataaatgccatttgaacagtgccgtctgtcatggaaaaacgtgagacgtttgtacaagccgtgtctaaggagctggttggagagtttttgcaatttgttcaacttgataaagaggcctctgatcctttcagcctaaatgaattactagatgaattatcaaggaaacagaaagaagaattatggcaaaggctgaagaatttattgacagatgtgttgttagaaagcccagtggatgggtggcaggtagtggaagcccagggtgaagacaatatggaaaccgaacatggctcaaaaatgagaaaaagcatagaaataatttatgcaattacatctgtgattcttgcttctgtgtctgtaataaatgaaagtgagaactacgaagccctactggaatgtgttattatattaaatggtattttatatgcattacctgagtctgaacgaaaactacagagttctattcaggatttgtgtgttacctggtgggagaaaggcctgcctgccaaggaagacacaggaaagacagcctttgtcatgttactaaggaggagtctggagactaagacaggtgcagacgtatgtcggctttggcgtatccatcaagctttatattgctttgattatgatttggaggaaagtggagaaattaaagatatgttacttgagtgcttcataaatattaattatatcaagaaagaagagggaagaagatttcttagttgtctcttcaactggaatatcaacttcatcaaaatgatccacgggaccattaaaaaccagttacagggattacaaaagtctttgatggtatacattgcagaaatttatttcagagcttggaaaaaggcttcagggaaaatactggaggcgattgaaaatgattgcatccaggacttcatgttccacgggatacaccttccgaggaggtctccagtgcattccaaagtgcgggaggttctgagttactttcaccatcaaaagaaagttcggcagggagtggaagagatgctttatagattatataagcccatcctttggagaggattaaaggccagaaactctgaagttcgatcaaatgctgcattgttgtttgttgaagcatttcctattagggatccaaaccttcatgctattgaaatggatagtgaaatccagaaacagtttgaagagctctatagccttttagaagatccttacccgatggtccgttccacagggatccttggtgtttgtaaaataacttctaagtactgggaaatgatgcccccgaccattcttattgacctcctgaagaaggtgactggggaactggcatttgacacgagctcagctgatgttcgttgttctgtctttaagtgtctgccaatgattttggacaacaaactgagccacccattgttagagcagctccttccagctctcagatacagtctccacgacaattcggagaaagtgagggtagcttttgtggacatgctgttgaagatcaaagctgtgagggctgctaagttttggaaaatatgtcccatggagcacattctggttcgtctggaaactgattctcgacctgtgtctcggcgcctggtgagcctcatctttaattctttcctgcctgtgaatcagccggaggaggtctggtgcgagcgctgtgtcaccctggtgcagatgaaccacgccgctgccaggaggttctatcagtacgcccacgaacacaccgcctgcaccaacatagcaaagctgattcacgttattcgtcattgcttaaatgcctgtatccagagggcagtgagagagcctccagaggacgaggaggaagaggacggaagggagaaggagaatgtgactgttctggacaaaacactgtcagtaaacgatgttgcatgcatggcaggtttactagaaatcattgtgattctctggaaaagtattgacagaagtatggaaaataataaagaggccaaactttacacgattaacaagtttgcctctgtgcttccagagtatctgaaagtatttaaggatgatcgctgcaagatccctttattcatgctaatgtcctttatgccggcctctgctgtccccccattcagctgtggtgtgatttccacgctgagaagccgggaggagggcgctgtggacaagagctactgcactttgttggattgcctctgctcctgggggcaggtggggcacattctggagcttgttgacaactggctgcccacagagcatgcccaggccaagagcaacacagcttctaaaggtagggtgcagatccatgacacacgcccagtcaaacctgaattggcattggtctacattgagtatctgctgactcatccaaagaaccgcgagtgcttgctctctgctcctcggaagaaacttaaccatcttttgaaagcccttgaaacgtcaaaggcagatctggagtcacttctgcagacaccgggtgggaagcctcgtggcttcagtgaagcagctgccccgcgagcctttggtctccactgtcgcctgagcatccatcttcagcacaagttctgctcagaaggaaaggtgtatttgtccatgttggaagacactggcttttggttagaaagcaaaattttatcttttattcaagatcaagaagaagactacctgaagcttcatagggtcatttatcagcaaattatccagacctacctgactgtgtgtaaagatgttgttatggtaggccttggtgaccatcagtttcagatgcaactcttacagcggagtcttggaatcatgcaaacagtgaagggatttttttatgtttcattacttcttgacattctgaaagagataactggaagttccttgattcagaaaacagattcagatgaagaagttgcaatgctgttggacacagtccagaaagtatttcagaaaatgttggaatgtattgcacggagcttcaggaagcagccggaagaaggcctgcggctgctttattctgttcagaggcctcttcatgagttcattactgctgttcagtctcggcacacagacacccctgtgcaccggggtgtactttctactctgatcgctgggcctgtggttgagataagtcaccagctacggaaggtttctgacgtagaagagcttacccctccagagcatctttctgatcttccaccattttcaaggtgtttaataggaataataataaagtcttcgaatgtggtcaggtcatttttggatgaattaaaggcatgtgtggcttctaatgatattgaaggcattgtgtgcctcacggctgctgtgcatattatcctggttattaatgcaggtaaacataaaagctcaaaagtgagggaggttgcagccactgttcacagaaaactaaagacattcatggaaattactttggaagaggatagcattgaaagatatgaggacttgctgtgttgcccaggctgggctctaactcctggactcctggactcaatctatccttctgcctcagtcccaattggctaggactgcaggcacacaccaccagacccagctaatgtaatttctatccatatgtgtctttatatttaaagtggtttttttatagacagtatataaatgggtcatgttttttgatcttctctgacaatctgtcttaaaattggtgcatatgtaccatattcaaagtgattattgatatagttggattaatatccaccatatttgttactgtcttctatttgttccccttgttatttgttcctatttctgtcttccactccttttctgtcttttgtggttttaactgaacattttatgatgccgttttctttcctagcatatcagttatacttttttttttttaaacctttcttagtggtttctttagagttggaatttttatttgtttttatctttcttagtggttgctttagagttggagttttcgtttataactaatccacgtttgctttcagatgacactataccactttgcaggtagggtggtatataataacaaaataatcctaatccttgcctctcgttccttgtatcattgctgtcattcattttgctaaggtataagcagacataagcatacataattgaatatattgttgctattattattttgaacaaactacatcttaggtcatttaagaataagaaaaataaaagtttttatttaccttcacttactccttctttgatgcttctcctttgtttgtgttgatccaaattctgacctatattcttttccttccctccagagaacttcttttaatgcttctttcaaggcatgtctactggcaactaattctcttaattttggtttgtcagagagtcttttacttctactttatttctttgcagggataatgttatgtagtttataattctagttgatgaatttttttctctctgtactttatttaatttattattattattttttgagacagagtcttgctctgttgcctagggtggaacgcagtggtgtgatctcagttcactgcaacctctgcctcctaagttcaaacgattcttgtacctcagcctgctgagtagctggtatacaggcacatcgccgccacacccagctcatttttgtattagtggagacagggcttcaccatgttgcccaggctggtctcgaattcttgatctcaagtgatctactcgcctcagcttctcaaattgctgggattactccccgtgcccggccactctctgtactttaaacatttcgctatactctcttcttggctcgtgtagtatctgagaaataggatataattctttttttgctcctcagtagataaggcgtatttttccctatctggtttctttcaatactttttctttgtttgatttttctgtaggttgaatatgatatgcctaggtgtagttttcttttctttttttttttttttttggcatttattctattcagtattctatgagcttcctggataaattctcagttattattgtctgaatatttcttctgttcctttctctcttctgaaattcttattatacatgttaacaccttttacagttgtctcacaggtcttggatatttcattctatcaaaacagctgcatttttgagttctgtttgctaatattttatttgagaatgtttgcattaggtttgaaataagattaaatggttgttggttgttttgttaaaaaaaaaaaaaaaaaaaaaaaaaaaaaaaaaaaaaaaaaaaaaaaaaaagaaaaaaaaaaaaaaaaaaa

SEQ ID NO: 140 - DNA, 1390 bp, Homo sapiens
gggaagtgctgttggagccgctgtggttgctgtccgcggagtggaagcgcgtgcttttgtttgtgtccctggccatggcgctgcagctctcccgggagcagggaatcaccctgcgcgggagcgccgaaatcgtggccgagttcttctcattcggcatcaacagcattttatatcagcgtggcatatatccatctgaaacctttactcgagtgcagaaatacggactcaccttgcttgtaactactgatcttgagctcataaaatacctaaataatgtggtggaacaactgaaagattggttatacaagtgttcagttcagaaactggttgtagttatctcaaatattgaaagtggtgaggtcctggaaagatggcagtttgatattgagtgtgacaagactgcaaaagatgacagtgcacccagagaaaagtctcagaaagctatccaggatgaaatccgttcagtgatcagacagatcacagctacggtgacatttctgccactgttggaagtttcttgttcatttgatctgctgatttatacagacaaagatttggttgtacctgaaaaatgggaagagtcgggaccacagtttattaccaattctgaggaagtccgccttcgttcatttactactacaatccacaaagtaaatagcatggtggcctacaaaattcctgtcaatgactgaggatgacatgaggaaaataatgtaattgtaattttgaaatgtggttttcctgaaatcaggtcatctatagttgatatgttttatttcattggttaatttttacatggagaaaaccaaaatgatacttactgaactgtgtgtaattgttcctttatttttttggtacctatttgacttaccatggagttaacatcatgaatttattgcacattgttcaaaaggaaccaggaggtttttttgtcaacattgtgatgtatattcctttgaagatagtaactgtagatggaaaaacttgtgctataaagctagatgctttcctaaatcagatgttttggtcaagtagtttgactcagtataggtagggagatatttaagtataaaatacaacaaaggaagtctaaatattcagaatctttgttaaggtcctgaaagtaactcataatctataaacaatgaaatattgctgtatagctccttttgaccttcatttcatgtatagttttccctattgaatcagtttccaattatttgactttaatttatgtaacttgaacctatgaagcaatggatatttgtactgtttaatgttctgtgatacagaactcttaaaaatgttttttcatgtgttttataaaatcaagttttaagtgaaagtgaggaaataaagttaagtttgttttaaaaaaaaaaaaaaaaaa

SEQ ID NO: 141 - DNA, 3143 bp, Homo sapiens
ctcgaggtaacctttggtggcgggaagagttcggaagttttcgcgccggggtggagtcatcctgggaacctccacgcgactttggtggaggtagttctttggcagcgggcatggcgggtaccgtggtgctggacgatgtggagctgcgggaggctcagagagattacctggacttcctggacgacgaggaagaccagggaatttatcagagcaaagttcgggagctgatcagtgacaaccaataccggctgattgtcaatgtgaatgacctgcgcaggaaaaacgagaagagggctaaccggcttctgaacaatgcctttgaggagctggttgccttccagcgggccttaaaggattttgtggcctccattgatgctacctatgccaagcagtatgaggagttctacgtaggactggaaggcagctttggctccaagcacgtctccccgcggactcttacctcctgcttcctcagctgtgtggtctgtgtggagggcattgtcactaaatgttctctagttcgtcccaaagtcgtccgcagtgtccactactgtcctgctactaagaagaccatagagcgacgttattctgatctcaccaccctggtggcctttccctccagctctgtctatcctaccaaggatgaggagaacaatccccttgagacagaatatggcctttctgtctacaaggatcaccagaccatcaccatccaggagatgccggagaaggccccagccggccagctcccccgctctgtggacgtcattctggatgatgacttggtggataaagcgaagcctggtgaccgggttcaggtggtgggaacctaccgttgccttcctggaaagaagggaggctacacctctgggaccttcaggactgtcctgattgcctgtaatgttaagcagatgagcaaggatgctcagccctctttctctgctgaggatatagccaagatcaagaagttcagtaaaacccgatccaaggatatctttgaccagctggccaagtcattggccccaagtatccatgggcatgactatgtcaagaaagcaatcctctgcttgctcttgggaggggtggaacgagacctagaaaatggcagccacatccgtggggacatcaatattcttctaataggagacccatccgttgccaagtctcagcttctgcggtatgtgctttgcactgcaccccgagctatccccaccactggccggggctcctctggagtgggtctgacggctgctgtcaccacagaccaggaaacaggagagcgccgtctggaagcaggggccatggtcctggctgaccgaggcgtggtttgcattgatgaatttgacaaaatgtctgacatggatcgcacagccatccatgaagtgatggagcagggtcgagtgaccattgccaaggctggcatccatgctcggctgaatgcccgctgcagtgttttggcagctgccaaccctgtctacggcaggtatgaccagtataagactccaatggagaacattgggctacaggactcactgctgtcacgatttgacttgctcttcatcatgctggatcagatggatcctgagcaggatcgggagatctcagaccatgtccttcggatgcaccgttacagagcacctggggagcaggatggcgatgctatgcccttgggtagtgctgtggatatcctggccacagatgatcccaactttagccaggaagatcagcaggacacccagatttatgagaagcatgacaaccttctacatgggaccaagaagaaaaaggagaagatggtgagtgcagcattcatgaagaagtacatccatgtggccaaaatcatcaagcctgtcctgacacaggagtcggccacctacattgcagaagagtattcacgcctgcgcagccaggatagcatgagctcagacaccgccaggacatctccagttacagcccgaacactggaaactctgattcgactggccacagcccatgcgaaggcccgcatgagcaagactgtggacctgcaggatgcagaggaagctgtggagttggtccagtatgcttactttaagaaggttctggagaaggagaagaaacgtaagaagcgaagtgaggatgaatcagagacagaagatgaagaggagaaaagccaagaggaccaggagcagaagaggaagagaaggaagactcgccagccagatgccaaagatggggattcatacgacccctatgacttcagtgacacagaggaggaaatgcctcaagtacacactccaaagacggcagactcacaggagaccaaggaatcccagaaagtggagttgagtgaatccaggttgaaggcattcaaggtggccctcttggatgtgttccgggaagctcatgcgcagtcaatcggcatgaatcgcctcacagaatccatcaaccgggacagcgaagagcccttctcttcagttgagatccaggctgctctgagcaagatgcaggatgacaatcaggtcatggtgtctgagggcatcatcttcctcatctgaggaggcctcgtctctgaacttgggttgtgccgagagagtttgttctgtgtttcccaccctctccctgacccaagtctttgcctctactcccttaacagtgttgaattcaactgaaggcgaggaatgttggtgatgaagctgagttcaggactcggtggaccctttgggaatgggtcatgaaagctgccatggggtgaggaaagaggagacagtgggagaggacaatgactattgcatcttcattgcaaaagcactggctcatccgccctacttcccatcccacacaaacccaattgtaaataacatatgacttctgagtacttttgggggcacaactgttttctgtttgctgtttttttgttttgttttttttctccagagcactttggtctagactaggctttgggtggttccaattggtggagagaagctctgaggcacgtcatgcaggtcaagaaagctttctttgcagtagcaccagttaaggtgaatatgtattgtatcacaaaacaaacccaatatccagatgaatatccgagatgttgaataaacttagccatttcgtacacatggtaaaaaaaaaaaaaaaaaaaaaaaaaaaaaaaa

SEQ ID NO: 142 - DNA, 3533 bp, Homo sapiens
gggtctcgcggtttgggagcgctactcgccaggtggactcggagtccgcgagcgtcgtcggcaagcggccgcctttccacggtaaccgcgcgccggcggggagggcgtggcgcggagccgacgggaacgtccgcgctgcggagcagggcagggaagccgggaggcgggcccggcccgagcttgtccttgtcgcgcaggtactccgagcactatgtcgtccccggcgtcgaccccgagccgccgcggcagccggcgtggaagggccacccccgcccagacgcctcggagtgaggatgccaggtcatctccctctcagagacgtagaggcgaggattccacctccacgggggagttgcagccgatgccaacctcgcctggagtggacctgcagagccctgctgcgcaggacgtgctgttttccagccctccccaaatgcattcttcagctatccctcttgactttgatgttagttcaccactgacatacggcactcccagctctcgggtagagggaaccccaagaagtggtgttaggggcacacctgtgagacagaggcctgacctgggctctgcacagaagggcctgcaagtggatctgcagtctgacggggcagcagcagaagatatagtggcaagtgagcagtctctaggccaaaaacttgtgatctggggaacagatgtaaatgtggcagcatgcaaagaaaactttcagagatttcttcagcgttttattgaccctctggctaaagaagaagaaaatgttggcatagatattactgaacctctatacatgcaacgacttggggagattaatgttattggtgagccatttttaaatgtgaactgtgaacacatcaaatcatttgacaaaaatttgtacagacaactcatctcttacccacaggaagttattccaacttttgacatggctgtcaatgaaatcttctttgaccgttaccctgactcaatcttagaacatcagattcaagtaagaccattcaacgcattgaagactaagaatatgagaaacctgaatccagaagacattgaccagctcatcaccatcagcggcatggtgatcaggacatcccagctgattcccgagatgcaggaggccttcttccagtgccaagtgtgtgcccacacgacccgggtggagatggaccgcggccgcattgcagagcccagtgtgtgcgggcgctgccacaccacccacagcatggcactcatccacaaccgctccctcttctctgacaagcagatgatcaagcttcaggagtctccggaagacatgcctgcagggcagacaccacacacagttatcctgtttgctcacaatgatctcgttgacaaggtccagcctggggacagagtgaatgttacaggcatctatcgagctgtgcctattcgagtcaatccaagagtgagtaatgtgaagtctgtctacaaaacccacattgatgtcattcattatcggaaaacggatgcaaaacgtctgcatggccttgatgaagaagcagaacagaaacttttttcagagaaacgtgtggaattgcttaaggaactttccaggaaaccagacatttatgagaggcttgcttcagccttggctccaagcatttatgaacatgaagatataaagaagggaattttgcttcagctctttggcgggacaaggaaggattttagtcacactggaaggggcaaatttcgggctgagatcaacatcttgctgtgtggcgaccctggtaccagcaagtcccagctgctgcagtacgtgtacaacctcgtccccaggggccagtacacgtctgggaagggctccagtgcagttggcctcactgcgtacgtaatgaaagaccctgagacaaggcagctggtcctgcagacaggtgctcttgtcctgagtgacaacggcatctgctgtatcgatgagttcgacaagatgaatgaaagtacaagatcggtattgcatgaagtcatggaacagcagactctgtccattgcaaaggctgggatcatctgtcagctcaatgcgcgcacctctgtcctggcagcagcaaatcccattgagtctcagtggaatcctaaaaaaacaaccattgaaaacatccagctgcctcatactttattatcaaggtttgatttgatcttcctcttgctggaccctcaggacgaagcctatgacaggcgtctggctcaccacctggtcgcactgtactaccagagcgaggagcaggcagaggaggagctcctggacatggcggtgctaaaggactacattgcctacgcgcacagcaccatcatgccgcggctaagtgaggaagccagccaggctctcatcgaggcttatgtagacatgaggaagattggcagtagccggggaatggtttctgcataccctcgacagctagagtcattaatccgcttagcagaagcccatgctaaagtaagattgtctaacaaagttgaagccattgatgtggaagaggccaaacgcctccatcgggaagctctgaagcagtctgcaactgatccccggactggcatcgtggacatatctattcttactacggggatgagtgccacctctcgtaaacggaaagaagaattagctgaagcattgaaaaagcttattttatctaagggcaaaacaccagctctaaaataccagcaactttttgaagatattcggggacaatctgacatagcaattactaaagatatgtttgaagaagcactgcgtgccctggcagatgatgatttcctgacagtgactgggaagaccgtgcgcttgctctgaagccttgtgagcaaggaaggctccctgcatgtcctgcttgctgcacgccacatgggtgtggtctgcatctcagttggccgccatcagtgtaaatagagcttaaagtcatggtttggctgcataaaaattttctaacttgggttcaatatttgtagtgaagtatctgttttcatttttttcacgttataaataaaaatactatgctggccgggcgcggtggctcacacctgtaatcccagcactttgggaggccaatgtgggtggatcatgaggtcaggagttcaagaccagcctagccaagatggtgaaaccccgtctctagtaaagataacaaaaaattagctgggcttgatggcatgcgcctgtaatcccagctactcgggaggttgaggcaggagaatcgcttaaacccaggcggcagaggttgcagtgagccaagatcgcgccactgcactccagcctcagcaatagagtgagactgtctcaaaaaaaaaaaaaaaaaaaaaacctgccaattttcaaacataccgtagagattattttcaggtgccattttatagtatagcagcagggcttttactctgtgtatgcacagatgcagtctggggcatggtttgtgtgctggactttctcatggccatcatcagtatgcttatggatttgatgacaggcatagcctgggcatatcacctcattggtaaagggctagagcctttcttttttatggcac

SEQ ID NO: 143 - DNA, 2548 bp, Homo sapiens
ttttcccgcgaaactcggcggctgagcgtggaggttcttgtctcccctggtttgtgaagtgcggaaaaccagaggcgcagtcatgtcgggattcgacgatcctggcattttctacagcgacagcttcgggggcgacgcccaggccgacgaggggcaggcccgcaaatcgcagctgcagaggcgcttcaaggagttcctgcggcagtaccgagtgggcaccgaccgcacgggcttcaccttcaaatacagggatgaactcaagcggcattacaacctgggggagtactggattgaggtggagatggaggatctggccagctttgatgaggacctggccgactacttgtacaagcagccagccgagcacctgcagctgctggaggaagctgccaaggaggtagctgatgaggtgacccggccccggccttctggggaggaggtgctccaggacatccaggtcatgctcaagtcggacgccagcccttccagcattcgtagcctgaagtcggacatgatgtcacacctggtgaagatccctggcatcatcatcgcggcctctgcggtccgtgccaaggccacccgcatctctatccagtgccgcagctgccgcaacaccctcaccaacattgccatgcgccctggcctcgagggctatgccctgcccaggaagtgcaacacagatcaggctgggcgccccaaatgcccattggacccgtacttcatcatgcccgacaaatgcaaatgcgtggacttccagaccctgaagctgcaggagctgcctgatgcagtcccccacggggagatgcccagacacatgcagctctactgcgacaggtacctgtgtgacaaggtcgtccctgggaacagggttaccatcatgggcatctactccatcaagaagtttggcctgactaccagcaggggccgtgacagggtgggcgtgggcatccgaagctcctacatccgtgtcctgggcatccaggtggacacagatggctctggccgcagctttgctggggccgtgagcccccaggaggaggaggagttccgtcgcctggctgccctcccaaatgtctatgaggtcatctccaagagcatcgccccctccatctttgggggcacagacatgaagaaggccattgcctgcctgctctttgggggctcccgaaagaggctccctgatggacttactcgccgaggagacatcaacctgctgatgctaggggaccctgggacagccaagtcccagcttctgaagtttgtggagaagtgttctcccattggggtatacacgtctgggaaaggcagcagcgcagctggactgacagcctcggtgatgagggacccttcgtcccggaatttcatcatggagggcggagccatggtcctggccgatggtggggtcgtctgtattgacgagtttgacaagatgcgagaagatgaccgtgtggcaatccacgaagccatggagcagcagaccatctctatcgccaaggctgggatcaccaccaccctgaactcccgctgctccgtcctggctgctgccaactcagtgttcggccgctgggatgagacgaagggggaggacaacattgacttcatgcccaccatcttgtcgcgcttcgacatgatcttcatcgtcaaggatgagcacaatgaggagagggatgtgatgctggccaagcatgtcatcactctgcacgtgagcgcactgacacagacacaggctgtggagggcgagattgacctggccaagctgaagaagtttattgcctactgccgagtgaagtgtggcccccggctgtcagcagaggctgcagagaaactgaagaaccgctacatcatcatgcggagcggggcccgtcagcacgagagggacagtgaccgccgctccagcatccccatcactgtgcggcagctggaggccattgtgcgcatcgcggaagccctcagcaagatgaagctgcagcccttcgccacagaggcagatgtggaggaggccctgcggctcttccaagtgtccacgttggatgctgccttgtccggtaccctgtcaggggtggagggcttcaccagccaggaggaccaggagatgctgagccgcatcgagaagcagctcaagcgccgctttgccattggctcccaggtgtctgagcacagcatcatcaaggacttcaccaagcagaaatacccggagcacgccatccacaaggtgctgcagctcatgctgcggcgcggcgagatccagcatcgcatgcagcgcaaggttctctaccgcctcaagtgagtcgcgccgcctcactggactcatggactcgcccacgcctcgcccctcctgccgctgcctgccattgacaatgttgctgggacctctgcctccccactgcagccctcgaacttcccaggcaccctcctttctgccccagaggaaggagctgtagtgtcctgctgcctctgggcgcccgcctctagcgcggttctgggaagtgtgcttttggcatccgttaataataaagccacggtgtgttcaggtaaaaaaaaaaaaaaa

SEQ ID NO: 144 - DNA, 3769 bp, Homo sapiens
aaagctgcagcgtctggaaaaaagcgacttgtggcggtcgagcgtggcgcaggcgaatcctcggcactaagcaaatatggacctcgcggcggcagcggagccgggcgccggcagccagcacctggaggtccgcgacgaggtggccgagaagtgccagaaactgttcctggacttcttggaggagtttcagagcagcgatggagaaattaaatacttgcaattagcagaggaactgattcgtcctgagagaaacacattggttgtgagttttgtggacctggaacaatttaaccagcaactttccaccaccattcaagaggagttctatagagtttacccttacctgtgtcgggccttgaaaacattcgtcaaagaccgtaaagagatccctcttgccaaggatttttatgttgcattccaagacctgcctaccagacacaagattcgagagctcacctcatccagaattggtttgctcactcgcatcagtgggcaggtggtgcggactcacccagttcacccagagcttgtgagcggaacttttctgtgcttggactgtcagacagtgatcagggatgtagaacagcagttcaaatacacacagccaaacatctgccgaaatccagtttgtgccaacaggaggagattcttactggatacaaataaatcaagatttgttgattttcaaaaggttcgtattcaagagacccaagctgagcttcctcgagggagtatcccccgcagtttagaagtaattttaagggctgaagctgtggaatcagctcaagctggtgacaagtgtgactttacagggacactgattgttgtgcctgacgtctccaagcttagcacaccaggagcacgtgcagaaactaattcccgtgtcagtggtgttgatggatatgagacagaaggcattcgaggactccgggcccttggtgttagggacctttcttataggctggtctttcttgcctgctgtgttgcgccaaccaacccaaggtttggggggaaagagctcagagatgaggaacagacagctgagagcattaagaaccaaatgactgtgaaagaatgggagaaagtgtttgagatgagtcaagataaaaatctataccacaatctttgtaccagcctgttccctactatacatggcaatgatgaagtaaaacggggtgtcctgctgatgctctttggtggcgttccaaagacaacaggagaagggacctctcttcgaggggacataaatgtttgcattgttggtgacccaagtacagctaagagccaatttctcaagcacgtggaggagttcagccccagagctgtctacaccagtggtaaagcgtccagtgctgctggcttaacagcagctgttgtgagagatgaagaatctcatgagtttgtcattgaggctggagctttgatgttggctgataatggtgtgtgttgtattgatgaatttgataagatggacgtgcgggatcaagttgctattcatgaagctatggaacagcagaccatatccatcactaaagcaggagtgaaggctactctgaacgcccggacgtccattttggcagcagcaaacccaatcagtggacactatgacagatcaaaatcattgaaacagaatataaatttgtcagctcccatcatgtcccgattcgatctcttctttatccttgtggatgaatgtaatgaggttacagattatgccattgccaggcgcatagtagatttgcattcaagaattgaggaatcaattgatcgtgtctattccctcgatgatatcagaagatatcttctctttgcaagacagtttaaacccaagatttccaaagagtcagaggacttcattgtggagcaatataaacatctccgccagagagatggttctggagtgaccaagtcttcatggaggattacagtgcgacagcttgagagcatgattcgtctctctgaagctatggctcggatgcactgctgtgatgaggtccaacctaaacatgtgaaggaagctttccggttactgaataaatcaatcatccgtgtggaaacacctgatgtcaatctagatcaagaggaagagatccagatggaggtagatgagggtgctggtggcatcaatggtcatgctgacagccctgctcctgtgaacgggatcaatggctacaatgaagacataaatcaagagtctgctcccaaagcctccttaaggctgggcttctctgagtactgccgaatctctaaccttattgtgcttcacctcagaaaggtggaagaagaagaggacgagtcagcattaaagaggagcgagcttgttaactggtacttgaaggaaatcgaatcagagatagactctgaagaagaacttataaataaaaaaagaatcatagagaaagttattcatcgactcacacactatgatcatgttctaattgagctcacccaggctggattgaaaggctccacagagggaagtgagagctatgaagaagatccctacttggtagttaaccctaactacttgctcgaagattgagatagtgaaagtaactgaccagagctgaggaactgtggcacagcacctcgtggcctggagcctggctggagctctgctagggacagaagtgtttctggaagtgatgcttccaggatttgttttcagaaacaagaattgagttgatggtcctatgtgtcacattcatcacaggtttcataccaacacaggcttcagcacttcctttggtgtgtttcctgtcccagtgaagttggaaccaaataatgtgtagtctctataaccaatacctttgttttcatgtgtaagaaaaggcccattacttttaaggtatgtgctgtcctattgagcaaataactttttttcaattgccagctactgcttttattcatcaaaataaaataacttgttctgaagttgtctattggatttctttctactgtaccctgattattacttccatctacttctgaatgtgagactttccctttttgcttaacctggagtgaagaggtagaactgtggtattatggatgaggtttctatgagaaggagtcattagagaactcatatgaaagctagaggccttagagatgactttccaaggttaattccagttgtttttttttttttttaagtttataaaagtttattatacttttttaaaattactctttagtaatttattttacttctgtgtcctaagggtaatttctcaggattgttttcaaattgcttttttaggggaaataggtcatttgctatattacaagcaatccccaaattttatggtcttccaggaaaagttattaccgtttatgatactaacagttcctgagacttagctatgatcagtatgttcatgaggtggagcagttcctgtgttgcagcttttaacaacagatggcattcattaaatcacaaagtatgttaaaggtcacaaaagcaaaataactgtctgaggctaaggcccacgtgggacagtctaatacccatgagtactcaacttgccttgatgtctgagctttccagtgcaatgtgaatttgagcagccagaaatctattagtagaaagcaagacagattaatataggttaaaacaatgatttaaatatgtttctcccaataattatctctttccctggaatcaacttgtatgaaaccttgtcaaaatgtactccacaagtatgtacaattaagtattttaaaaataaatggcaaacattaaaaacaaaaaaaaaaaaaaaaaaaa

SEQ ID NO: 145 - DNA, 2501 bp, Homo sapiens
cgaaaagattcttaggaacgccgtaccagccgcgtctctcaggacagcaggcccctgtccttctgtcgggcgccgctcagccgtgccctccgcccctcaggttctttttctaattccaaataaacttgcaagaggactatgaaagattatgatgaacttctcaaatattatgaattacatgaaactattgggacaggtggctttgcaaaggtcaaacttgcctgccatatccttactggagagatggtagctataaaaatcatggataaaaacacactagggagtgatttgccccggatcaaaacggagattgaggccttgaagaacctgagacatcagcatatatgtcaactctaccatgtgctagagacagccaacaaaatattcatggttcttgagtactgccctggaggagagctgtttgactatataatttcccaggatcgcctgtcagaagaggagacccgggttgtcttccgtcagatagtatctgctgttgcttatgtgcacagccagggctatgctcacagggacctcaagccagaaaatttgctgtttgatgaatatcataaattaaagctgattgactttggtctctgtgcaaaacccaagggtaacaaggattaccatctacagacatgctgtgggagtctggcttatgcagcacctgagttaatacaaggcaaatcatatcttggatcagaggcagatgtttggagcatgggcatactgttatatgttcttatgtgtggatttctaccatttgatgatgataatgtaatggctttatacaagaagattatgagaggaaaatatgatgttcccaagtggctctctcccagtagcattctgcttcttcaacaaatgctgcaggtggacccaaagaaacggatttctatgaaaaatctattgaaccatccctggatcatgcaagattacaactatcctgttgagtggcaaagcaagaatccttttattcacctcgatgatgattgcgtaacagaactttctgtacatcacagaaacaacaggcaaacaatggaggatttaatttcactgtggcagtatgatcacctcacggctacctatcttctgcttctagccaagaaggctcggggaaaaccagttcgtttaaggctttcttctttctcctgtggacaagccagtgctaccccattcacagacatcaagtcaaataattggagtctggaagatgtgaccgcaagtgataaaaattatgtggcgggattaatagactatgattggtgtgaagatgatttatcaacaggtgctgctactccccgaacatcacagtttaccaagtactggacagaatcaaatggggtggaatctaaatcattaactccagccttatgcagaacacctgcaaataaattaaagaacaaagaaaatgtatatactcctaagtctgctgtaaagaatgaagagtactttatgtttcctgagccaaagactccagttaataagaaccagcataagagagaaatactcactacgccaaatcgttacactacaccctcaaaagctagaaaccagtgcctgaaagaaactccaattaaaataccagtaaattcaacaggaacagacaagttaatgacaggtgtcattagccctgagaggcggtgccgctcagtggaattggatctcaaccaagcacatatggaggagactccaaaaagaaagggagccaaagtgtttgggagccttgaaagggggttggataaggttatcactgtgctcaccaggagcaaaaggaagggttctgccagagacgggcccagaagactaaagcttcactataatgtgactacaactagattagtgaatccagatcaactgttgaatgaaataatgtctattcttccaaagaagcatgttgactttgtacaaaagggttatacactgaagtgtcaaacacagtcagattttgggaaagtgacaatgcaatttgaattagaagtgtgccagcttcaaaaacccgatgtggtgggtatcaggaggcagcggcttaagggcgatgcctgggtttacaaaagattagtggaagacatcctatctagctgcaaggtataattgatggattcttccatcctgccggatgagtgtgggtgtgatacagcctacataaagactgttatgatcgctttgattttaaagttcattggaactaccaacttgtttctaaagagctatcttaagaccaatatctctttgtttttaaacaaaagatattattttgtgtatgaatctaaatcaagcccatctgtcattatgttactgtcttttttaatcatgtggttttgtatattaataattgttgactttcttagattcacttccatatgtgaatgtaagctcttaactatgtctctttgtaatgtgtaatttctttctgaaataaaaccatttgtgaatataaaaaaaaaaaaaaaaaaaaaaaaaaaaaaaaaaaaaaaaaaaaaaaaaaaaaaaaaaaaaaa

SEQ ID NO: 146 - DNA, 12515 bp, Homo sapiens
ctaccgggcggaggtgagcgcggcgccggctcctcctgcggcggactttgggtgcgacttgacgagcggtggttcgacaagtggccttgcgggccggatcgtcccagtggaagagttgtaaatttgcttctggccttcccctacggattatacctggccttcccctacggattatactcaacttactgtttagaaaatgtggcccacgagacgcctggttactatcaaaaggagcggggtcgacggtccccactttcccctgagcctcagcacctgcttgtttggaaggggtattgaatgtgacatccgtatccagcttcctgttgtgtcaaaacaacattgcaaaattgaaatccatgagcaggaggcaatattacataatttcagttccacaaatccaacacaagtaaatgggtctgttattgatgagcctgtacggctaaaacatggagatgtaataactattattgatcgttccttcaggtatgaaaatgaaagtcttcagaatggaaggaagtcaactgaatttccaagaaaaatacgtgaacaggagccagcacgtcgtgtctcaagatctagcttctcttctgaccctgatgagaaagctcaagattccaaggcctattcaaaaatcactgaaggaaaagtttcaggaaatcctcaggtacatatcaagaatgtcaaagaagacagtaccgcagatgactcaaaagacagtgttgctcagggaacaactaatgttcattcctcagaacatgctggacgtaatggcagaaatgcagctgatcccatttctggggattttaaagaaatttccagcgttaaattagtgagccgttatggagaattgaagtctgttcccactacacaatgtcttgacaatagcaaaaaaaatgaatctcccttttggaagctttatgagtcagtgaagaaagagttggatgtaaaatcacaaaaagaaaatgtcctacagtattgtagaaaatctggattacaaactgattacgcaacagagaaagaaagtgctgatggtttacagggggagacccaactgttggtctcgcgtaagtcaagaccaaaatctggtgggagcggccacgctgtggcagagcctgcttcacctgaacaagagcttgaccagaacaaggggaagggaagagacgtggagtctgttcagactcccagcaaggctgtgggcgccagctttcctctctatgagccggctaaaatgaagacccctgtacaatattcacagcaacaaaattctccacaaaaacataagaacaaagacctgtatactactggtagaagagaatctgtgaatctgggtaaaagtgaaggcttcaaggctggtgataaaactcttactcccaggaagctttcaactagaaatcgaacaccagctaaagttgaagatgcagctgactctgccactaagccagaaaatctctcttccaaaaccagaggaagtattcctacagatgtggaagttctgcctacggaaactgaaattcacaatgagccatttttaactctgtggctcactcaagttgagaggaagatccaaaaggattccctcagcaagcctgagaaattgggcactacagctggacagatgtgctctgggttacctggtcttagttcagttgatatcaacaactttggtgattccattaatgagagtgagggaatacctttgaaaagaaggcgtgtgtcctttggtgggcacctaagacctgaactatttgatgaaaacttgcctcctaatacgcctctcaaaaggggagaagccccaaccaaaagaaagtctctggtaatgcacactccacctgtcctgaagaaaatcatcaaggaacagcctcaaccatcaggaaaacaagagtcaggttcagaaatccatgtggaagtgaaggcacaaagcttggttataagccctccagctcctagtcctaggaaaactccagttgccagtgatcaacgccgtaggtcctgcaaaacagcccctgcttccagcagcaaatctcagacagaggttcctaagagaggaggagaaagagtggcaacctgccttcaaaagagagtgtctatcagccgaagtcaacatgatattttacagatgatatgttccaaaagaagaagtggtgcttcggaagcaaatctgattgttgcaaaatcatgggcagatgtagtaaaacttggtgcaaaacaaacacaaactaaagtcataaaacatggtcctcaaaggtcaatgaacaaaaggcaaagaagacctgctactccaaagaagcctgtgggcgaagttcacagtcaatttagtacaggccacgcaaactctccttgtaccataataatagggaaagctcatactgaaaaagtacatgtgcctgctcgaccctacagagtgctcaacaacttcatttccaaccaaaaaatggactttaaggaagatctttcaggaatagctgaaatgttcaagaccccagtgaaggagcaaccgcagttgacaagcacatgtcacatcgctatttcaaattcagagaatttgcttggaaaacagtttcaaggaactgattcaggagaagaacctctgctccccacctcagagagttttggaggaaatgtgttcttcagtgcacagaatgcagcaaaacagccatctgataaatgctctgcaagccctcccttaagacggcagtgtattagagaaaatggaaacgtagcaaaaacgcccaggaacacctacaaaatgacttctctggagacaaaaacttcagatactgagacagagccttcaaaaacagtatccactgtaaacaggtcaggaaggtctacagagttcaggaatatacagaagctacctgtggaaagtaagagtgaagaaacaaatacagaaattgttgagtgcatcctaaaaagaggtcagaaggcaacactactacaacaaaggagagaaggagagatgaaggaaatagaaagaccttttgagacatataaggaaaatattgaattaaaagaaaacgatgaaaagatgaaagcaatgaagagatcaagaacttgggggcagaaatgtgcaccaatgtctgacctgacagacctcaagagcttgcctgatacagaactcatgaaagacacggcacgtggccagaatctcctccaaacccaagatcatgccaaggcaccaaagagtgagaaaggcaaaatcactaaaatgccctgccagtcattacaaccagaaccaataaacaccccaacacacacaaaacaacagttgaaggcatccctggggaaagtaggtgtgaaagaagagctcctagcagtcggcaagttcacacggacgtcaggggagaccacgcacacgcacagagagccagcaggagatggcaagagcatcagaacgtttaaggagtctccaaagcagatcctggacccagcagcccgtgtaactggaatgaagaagtggccaagaacgcctaaggaagaggcccagtcactagaagacctggctggcttcaaagagctcttccagacaccaggtccctctgaggaatcaatgactgatgagaaaactaccaaaatagcctgcaaatctccaccaccagaatcagtggacactccaacaagcacaaagcaatggcctaagagaagtctcaggaaagcagatgtagaggaagaattcttagcactcaggaaactaacaccatcagcagggaaagccatgcttacgcccaaaccagcaggaggtgatgagaaagacattaaagcatttatgggaactccagtgcagaaactggacctggcaggaactttacctggcagcaaaagacagctacagactcctaaggaaaaggcccaggctctagaagacctggctggctttaaagagctcttccagactcctggtcacaccgaggaattagtggctgctggtaaaaccactaaaataccctgcgactctccacagtcagacccagtggacaccccaacaagcacaaagcaacgacccaagagaagtatcaggaaagcagatgtagagggagaactcttagcgtgcaggaatctaatgccatcagcaggcaaagccatgcacacgcctaaaccatcagtaggtgaagagaaagacatcatcatatttgtgggaactccagtgcagaaactggacctgacagagaacttaaccggcagcaagagacggccacaaactcctaaggaagaggcccaggctctggaagacctgactggctttaaagagctcttccagacccctggtcatactgaagaagcagtggctgctggcaaaactactaaaatgccctgcgaatcttctccaccagaatcagcagacaccccaacaagcacaagaaggcagcccaagacacctttggagaaaagggacgtacagaaggagctctcagccctgaagaagctcacacagacatcaggggaaaccacacacacagataaagtaccaggaggtgaggataaaagcatcaacgcgtttagggaaactgcaaaacagaaactggacccagcagcaagtgtaactggtagcaagaggcacccaaaaactaaggaaaaggcccaacccctagaagacctggctggctggaaagagctcttccagacaccagtatgcactgacaagcccacgactcacgagaaaactaccaaaatagcctgcagatcacaaccagacccagtggacacaccaacaagctccaagccacagtccaagagaagtctcaggaaagtggacgtagaagaagaattcttcgcactcaggaaacgaacaccatcagcaggcaaagccatgcacacacccaaaccagcagtaagtggtgagaaaaacatctacgcatttatgggaactccagtgcagaaactggacctgacagagaacttaactggcagcaagagacggctacaaactcctaaggaaaaggcccaggctctagaagacctggctggctttaaagagctcttccagacacgaggtcacactgaggaatcaatgactaacgataaaactgccaaagtagcctgcaaatcttcacaaccagacctagacaaaaacccagcaagctccaagcgacggctcaagacatccctggggaaagtgggcgtgaaagaagagctcctagcagttggcaagctcacacagacatcaggagagactacacacacacacacagagccaacaggagatggtaagagcatgaaagcatttatggagtctccaaagcagatcttagactcagcagcaagtctaactggcagcaagaggcagctgagaactcctaagggaaagtctgaagtccctgaagacctggccggcttcatcgagctcttccagacaccaagtcacactaaggaatcaatgactaatgaaaaaactaccaaagtatcctacagagcttcacagccagacctagtggacaccccaacaagctccaagccacagcccaagagaagtctcaggaaagcagacactgaagaagaatttttagcatttaggaaacaaacgccatcagcaggcaaagccatgcacacacccaaaccagcagtaggtgaagagaaagacatcaacacgtttttgggaactccagtgcagaaactggaccagccaggaaatttacctggcagcaatagacggctacaaactcgtaaggaaaaggcccaggctctagaagaactgactggcttcagagagcttttccagacaccatgcactgataaccccacagctgatgagaaaactaccaaaaaaatactctgcaaatctccgcaatcagacccagcggacaccccaacaaacacaaagcaacggcccaagagaagcctcaagaaagcagacgtagaggaagaatttttagcattcaggaaactaacaccatcagcaggcaaagccatgcacacgcctaaagcagcagtaggtgaagagaaagacatcaacacatttgtggggactccagtggagaaactggacctgctaggaaatttacctggcagcaagagacggccacaaactcctaaagaaaaggccaaggctctagaagatctggctggcttcaaagagctcttccagacaccaggtcacactgaggaatcaatgaccgatgacaaaatcacagaagtatcctgcaaatctccacaaccagacccagtcaaaaccccaacaagctccaagcaacgactcaagatatccttggggaaagtaggtgtgaaagaagaggtcctaccagtcggcaagctcacacagacgtcagggaagaccacacagacacacagagagacagcaggagatggaaagagcatcaaagcgtttaaggaatctgcaaagcagatgctggacccagcaaactatggaactgggatggagaggtggccaagaacacctaaggaagaggcccaatcactagaagacctggccggcttcaaagagctcttccagacaccagaccacactgaggaatcaacaactgatgacaaaactaccaaaatagcctgcaaatctccaccaccagaatcaatggacactccaacaagcacaaggaggcggcccaaaacacctttggggaaaagggatatagtggaagagctctcagccctgaagcagctcacacagaccacacacacagacaaagtaccaggagatgaggataaaggcatcaacgtgttcagggaaactgcaaaacagaaactggacccagcagcaagtgtaactggtagcaagaggcagccaagaactcctaagggaaaagcccaacccctagaagacttggctggcttgaaagagctcttccagacaccagtatgcactgacaagcccacgactcacgagaaaactaccaaaatagcctgcagatctccacaaccagacccagtgggtaccccaacaatcttcaagccacagtccaagagaagtctcaggaaagcagacgtagaggaagaatccttagcactcaggaaacgaacaccatcagtagggaaagctatggacacacccaaaccagcaggaggtgatgagaaagacatgaaagcatttatgggaactccagtgcagaaattggacctgccaggaaatttacctggcagcaaaagatggccacaaactcctaaggaaaaggcccaggctctagaagacctggctggcttcaaagagctcttccagacaccaggcactgacaagcccacgactgatgagaaaactaccaaaatagcctgcaaatctccacaaccagacccagtggacaccccagcaagcacaaagcaacggcccaagagaaacctcaggaaagcagacgtagaggaagaatttttagcactcaggaaacgaacaccatcagcaggcaaagccatggacaccccaaaaccagcagtaagtgatgagaaaaatatcaacacatttgtggaaactccagtgcagaaactggacctgctaggaaatttacctggcagcaagagacagccacagactcctaaggaaaaggctgaggctctagaggacctggttggcttcaaagaactcttccagacaccaggtcacactgaggaatcaatgactgatgacaaaatcacagaagtatcctgtaaatctccacagccagagtcattcaaaacctcaagaagctccaagcaaaggctcaagatacccctggtgaaagtggacatgaaagaagagcccctagcagtcagcaagctcacacggacatcaggggagactacgcaaacacacacagagccaacaggagatagtaagagcatcaaagcgtttaaggagtctccaaagcagatcctggacccagcagcaagtgtaactggtagcaggaggcagctgagaactcgtaaggaaaaggcccgtgctctagaagacctggttgacttcaaagagctcttctcagcaccaggtcacactgaagagtcaatgactattgacaaaaacacaaaaattccctgcaaatctcccccaccagaactaacagacactgccacgagcacaaagagatgccccaagacacgtcccaggaaagaagtaaaagaggagctctcagcagttgagaggctcacgcaaacatcagggcaaagcacacacacacacaaagaaccagcaagcggtgatgagggcatcaaagtattgaagcaacgtgcaaagaagaaaccaaacccagtagaagaggaacccagcaggagaaggccaagagcacctaaggaaaaggcccaacccctggaagacctggccggcttcacagagctctctgaaacatcaggtcacactcaggaatcactgactgctggcaaagccactaaaataccctgcgaatctcccccactagaagtggtagacaccacagcaagcacaaagaggcatctcaggacacgtgtgcagaaggtacaagtaaaagaagagccttcagcagtcaagttcacacaaacatcaggggaaaccacggatgcagacaaagaaccagcaggtgaagataaaggcatcaaagcattgaaggaatctgcaaaacagacaccggctccagcagcaagtgtaactggcagcaggagacggccaagagcacccagggaaagtgcccaagccatagaagacctagctggcttcaaagacccagcagcaggtcacactgaagaatcaatgactgatgacaaaaccactaaaataccctgcaaatcatcaccagaactagaagacaccgcaacaagctcaaagagacggcccaggacacgtgcccagaaagtagaagtgaaggaggagctgttagcagttggcaagctcacacaaacctcaggggagaccacgcacaccgacaaagagccggtaggtgagggcaaaggcacgaaagcatttaagcaacctgcaaagcggaacgtggacgcagaagatgtaattggcagcaggagacagccaagagcacctaaggaaaaggcccaacccctggaagacctggccagcttccaagagctctctcaaacaccaggccacactgaggaactggcaaatggtgctgctgatagctttacaagcgctccaaagcaaacacctgacagtggaaaacctctaaaaatatccagaagagttcttcgggcccctaaagtagaacccgtgggagacgtggtaagcaccagagaccctgtaaaatcacaaagcaaaagcaacacttccctgcccccactgcccttcaagaggggaggtggcaaagatggaagcgtcacgggaaccaagaggctgcgctgcatgccagcaccagaggaaattgtggaggagctgccagccagcaagaagcagagggttgctcccagggcaagaggcaaatcatccgaacccgtggtcatcatgaagagaagtttgaggacttctgcaaaaagaattgaacctgcggaagagctgaacagcaacgacatgaaaaccaacaaagaggaacacaaattacaagactcggtccctgaaaataagggaatatccctgcgctccagacgccaagataagactgaggcagaacagcaaataactgaggtctttgtattagcagaaagaatagaaataaacagaaatgaaaagaagcccatgaagacctccccagagatggacattcagaatccagatgatggagcccggaaacccatacctagagacaaagtcactgagaacaaaaggtgcttgaggtctgctagacagaatgagagctcccagcctaaggtggcagaggagagcggagggcagaagagtgcgaaggttctcatgcagaatcagaaagggaaaggagaagcaggaaattcagactccatgtgcctgagatcaagaaagacaaaaagccagcctgcagcaagcactttggagagcaaatctgtgcagagagtaacgcggagtgtcaagaggtgtgcagaaaatccaaagaaggctgaggacaatgtgtgtgtcaagaaaataacaaccagaagtcatagggacagtgaagatatttgacagaaaaatcgaactgggaaaaatataataaagttagttttgtgataagttctagtgcagtttttgtcataaattacaagtgaattctgtaagtaaggctgtcagtctgcttaagggaagaaaactttggatttgctgggtctgaatcggcttcataaactccactgggagcactgctgggctcctggactgagaatagttgaacaccgggggctttgtgaaggagtctgggccaaggtttgccctcagctttgcagaatgaagccttgaggtctgtcaccacccacagccaccctacagcagccttaactgtgacacttgccacactgtgtcgtcgtttgtttgcctatgttctccagggcacggtggcaggaacaactatcctcgtctgtcccaacactgagcaggcactcggtaaacacgaatgaatggataagcgcacggatgaatggagcttacaagatctgtctttccaatggccgggggcatttggtccccaaattaaggctattggacatctgcacaggacagtcctatttttgatgtcctttcctttctgaaaataaagttttgtgctttggagaatgactcgtgagcacatctttagggaccaagagtgactttctgtaaggagtgactcgtggcttgccttggtctcttgggaatacttttctaactagggttgctctcacctgagacattctccacccgcggaatctcagggtcccaggctgtgggccatcacgacctcaaactggctcctaatctccagctttcctgtcattgaaagcttcggaagtttactggctctgctcccgcctgttttctttctgactctatctggcagcccgatgccacccagtacaggaagtgacaccagtactctgtaaagcatcatcatccttggagagactgagcactcagcaccttcagccacgatttcaggatcgcttccttgtgagccgctgcctccgaaatctcctttgaagcccagacatctttctccagcttcagacttgtagatataactcgttcatcttcatttactttccactttgccccctgtcctctctgtgttccccaaatcagagaatagcccgccatcccccagatcacctgtctggattcctccccattcacccaccttgccaggtgcaggtgaggatggtgcaccagacagggtagctgtcccccaaaatgtgccctgtgcgggcagtgccctgtctccacgtttgtttccccagtgtctggcggggagccaggtgacatcataaatacttgctgaatgaatgcagaaatcagcggtactgacttgtactatattggctgccatgatagggttctcacagcgtcatccatgatcgtaagggagaatgacattctgcttgagggagggaatagaaaggggcagggaggggacatctgagggcttcacagggctgcaaagggtacagggattgcaccagggcagaacaggggagggtgttcaaggaagagtggctcttagcagaggcactttggaaggtgtgaggcataaatgcttccttctacgtaggccaacctcaaaactttcagtaggaatgttgctatgatcaagttgttctaacactttagacttagtagtaattatgaacctcacatagaaaaatttcatccagccatatgcctgtggagtggaatattctgtttagtagaaaaatcctttagagttcagctctaaccagaaatcttgctgaagtatgtcagcaccttttctcaccctggtaagtacagtatttcaagagcacgctaagggtggttttcattttacagggctgttgatgatgggttaaaaatgttcatttaagggctacccccgtgtttaatagatgaacaccacttctacacaaccctccttggtactgggggagggagagatctgacaaatactgcccattcccctaggctgactggatttgagaacaaatacccacccatttccaccatggtatggtaacttctctgagcttcagtttccaagtgaatttccatgtaataggacattcccattaaatacaagctgtttttactttttcgcctcccagggcctgtgcgatctggtcccccagcctctcttgggctttcttacactaactctgtacctaccatctcctgcctcccttaggcaggcacctccaaccaccacacactccctgctgttttccctgcctggaactttcccaccagccccaccaagatcatttcatccagtcctgagctcagcttaagggaggcttcttgcctgtgggttccctcacccccatgcctgtcctccaggctggggcaggttcttagtttgcctggaattgttctgtacctctttgtagcacgtagtgttgtgaaactaagccactaattgagtttctggctcccctcctggggttgtaagttttgttcattcatgagggccgactgtatttcctggttactgtatcccagtgaccagccacaggagatgtccaataaagtatgtgatgaaatggtcttaaaaaaaaaaaaaaaaaaaaaa

SEQ ID NO: 147 - DNA, 2547 bp, Homo sapiens
ggattggctgttcggagcggcgaggggcttggcgggagcttccagtcgctcgagagcggagagcggcaccatggccccgcgggggcggcggcggccgcggcctcacaggtctgagggcgcaagacgttcaaagaacactttagaaagaacacattccatgaaagataaagctggtcaaaagtgcaagcctattgacgtgttcgactttcctgataattctgatgtctcaagcattggcaggctgggtgaaaatgagaaagatgaagaaacttatgagacctttgatcctcctttacatagcacagctatatatgctgatgaagaagaattctccaaacattgtggactgtctctctcttcaactcctccaggaaaagaagcaaaaagaagttcagacacttctggaaatgaagcaagtgaaatcgaatctgtaaaaattagtgcaaaaaagccaggaagaaagctcaggcccattagtgatgactctgaaagcattgaagaaagtgatacaaggagaaaagttaaatcagcagagaaaataagtacacaacgtcatgaggttattcgaaccacagcgtcttcagaactttcagagaaaccagctgagtctgtcacttctaaaaagacaggaccccttagtgcccagccctctgttgaaaaagagaacttggcaatagaaagtcaatcgaaaactcagaaaaaagggaagatatctcatgacaaaaggaagaaatcaagaagtaaagccataggctcagatacttctgacattgtgcacatttggtgtccagaaggaatgaaaaccagtgacatcaaggagttgaatattgttttgcctgaatttgagaaaacccacctagagcatcaacaaagaatagaatctaaagtttgtaaggcagccatcgccacattttatgttaatgttaaagaacaattcatcaaaatgcttaaagaaagccagatgttgacaaatctgaaaaggaagaatgctaagatgatttcagatatcgaaaagaaaaggcagcgtatgattgaagtccaggatgaactgcttcggttagagccacagctgaaacaactacaaacaaaatatgatgaacttaaagagagaaagtcttcccttaggaatgcagcatatttcttatctaatttaaaacagctttatcaagattattcagatgttcaagctcaagaaccaaacgtaaaggaaacgtatgattcatccagccttccagctctgttatttaaagcaagaacacttctgggagccgaaagccatctgcgaaatatcaaccatcagttagagaagctccttgaccagggatgagaagagcagtctactaaaatgtgcctataggaagactagtctcatgctgttaccttctgaaactgtacctttataaatcaattgttttgcaaagaagttatggcctacttagaatctaaaatttgttattcaaattaaatggctgtgaacaatgttaaatagcatcagtttgtccaatagttttaaaggccataatcatcttttctggttaatatcttgagtaattttaaaatgttgacaccttaatcggtcccaggtatgagctataataaacttgtaaaattaagttgatgtgaacataattttgattaattaataaggcgatttctcctgaatttacaccaaagctaatttttaatgaaattggtttacagaagtaaaaaacaaaaattggaaagcaaagtaataaaacttagtttatataaacaggttgaatgatatatttatcaaatctcacagacatcaggcaaattatagcctggtgacaaaagtgttcatagtgaattagttactcttgtaatacttctataattagttcatcaggaatttcatccacttcactgttataactgagaagactgttctctgcagcttcagctaattcagcatcttcagtagcttctaaaaaataagcatcatcaatgccattatcccagacagcatcagcagatgcacctgttgacagcctgctaggtgatggtttatgaggattctgggtttcattgctcctagtttcatctgcttcatctgttgtaaactcttcttcctttatttcagtggtgaagggatagagagtgggataggaaaatatttactcaggatatgtgatttaaccttatactctatgttgaagtaaggtattaagtgacagatactaaagtgaatatgcaggaggaatgctgtctccgatatctcaccgtgggaatgagtgcactgattcaaacgttgctgcactgaagctcagacacacttgaaactccaaatttgaaattacctacagttctgtgcacatacttttcaatactccccgacggaagagcaagggtggatttaattttttaacaagtggacagtccagctgaagacaaatcagaagataaatttgctatcttgacaatggacttagtacccatgctttaaattttaaagtatttagcaaatcgtaaacatggattgaaaaaagattaaaaacagttgccaaaatataaaaaaaaaaaaaa

SEQ ID NO: 148 - DNA, 5164 bp, Homo sapiens
acgttatccatgaagtgtcgcgagagaaacggacgccgttctctcccgcggaattcaggtttacggccctgcgggttctcagaggcaagttcagaccgtgttgttttcttttcacggatcctgccctttcttcccgaaaagaagacagccttgggtcgcgattgtggggcttcgaagagtccagcagtgggaatttctagaatttggaatcgagtgcattttctgacatttgagtacagtacccaggggttcttggagaagaacctggtcccagaggagcttgactgaccataaaaatgagtactgcagatgcacttgatgatgaaaacacatttaaaatattagttgcaacagatattcatcttggatttatggagaaagatgcagtcagaggaaatgatacgtttgtaacactcgatgaaattttaagacttgcccaggaaaatgaagtggattttattttgttaggtggtgatctttttcatgaaaataagccctcaaggaaaacattacatacctgcctcgagttattaagaaaatattgtatgggtgatcggcctgtccagtttgaaattctcagtgatcagtcagtcaactttggttttagtaagtttccatgggtgaactatcaagatggcaacctcaacatttcaattccagtgtttagtattcatggcaatcatgacgatcccacaggggcagatgcactttgtgccttggacattttaagttgtgctggatttgtaaatcactttggacgttcaatgtctgtggagaagatagacattagtccggttttgcttcaaaaaggaagcacaaagattgcgctatatggtttaggatccattccagatgaaaggctctatcgaatgtttgtcaataaaaaagtaacaatgttgagaccaaaggaagatgagaactcttggtttaacttatttgtgattcatcagaacaggagtaaacatggaagtactaacttcattccagaacaatttttggatgacttcattgatcttgttatctggggccatgaacatgagtgtaaaatagctccaaccaaaaatgaacaacagctgttttatatctcacaacctggaagctcagtggttacttctctttccccaggagaagctgtaaagaaacatgttggtttgctgcgtattaaagggaggaagatgaatatgcataaaattcctcttcacacagtgcggcagtttttcatggaggatattgttctagctaatcatccagacatttttaacccagataatcctaaagtaacccaagccatacaaagcttctgtttggagaagattgaagaaatgcttgaaaatgctgaacgggaacgtctgggtaattctcaccagccagagaagcctcttgtacgactgcgagtggactatagtggaggttttgaacctttcagtgttcttcgctttagccagaaatttgtggatcgggtagctaatccaaaagacattatccattttttcaggcatagagaacaaaaggaaaaaacaggagaagagatcaactttgggaaacttatcacaaagccttcagaaggaacaactttaagggtagaagatcttgtaaaacagtactttcaaaccgcagagaagaatgtgcagctctcactgctaacagaaagagggatgggtgaagcagtacaagaatttgtggacaaggaggagaaagatgccattgaggaattagtgaaataccagttggaaaaaacacagcgatttcttaaagaacgtcatattgatgccctcgaagacaaaatcgatgaggaggtacgtcgtttcagagaaaccagacaaaaaaatactaatgaagaagatgatgaagtccgtgaggctatgaccagggccagagcactcagatctcagtcagaggagtctgcttctgcctttagtgctgatgaccttatgagtatagatttagcagaacagatggctaatgactctgatgatagcatctcagcagcaaccaacaaaggaagaggccgaggaagaggtcgaagaggtggaagagggcagaattcagcatcgagaggagggtctcaaagaggaagagcctttaaatctacaagacagcagccttcccgaaatgtcactactaagaattattcagaggtgattgaggtagatgaatcagatgtggaagaagacatttttcctaccacttcaaagacagatcaaaggtggtccagcacatcatccagcaaaatcatgtcccagagtcaagtatcgaaaggggttgattttgaatcaagtgaggatgatgatgatgatccttttatgaacactagttctttaagaagaaatagaagataatatatttaatggcactgagaaacatgcaagatacaggaaaaatgaaaatgttacaagctaagagtttacagtttaagattttaagtattgtttcctgagcataactccataagtaagaaatttctagttcacagacatacaatagcattgattcaccttgtttttttaacctggttgttgtagtaagagctttgtttcaatatcactcttgagtaaagattaaaataaagctaccattttacatttctatttcataatgaaaaactatgtcagtattttaatatggttacatttagccaaagttgagggaaagagcttataaaatttaacttcttcataattttagtaatttcctagaggttctgggttttctgaaagtaaaacaatttatgcgaacctatgtctaaattcactgtttgttactatgtatgtttttttccaatgcttcttataagactaaatgattagaagtacctaatagtttgaacagatatgtttttatttaaaagagtagaataacctttcagaattactgagttttttattccagttgtagcaaagatttcaaaagattgtgttcccattaagtggtagtaatttcctttattattctgtatccttaatggtgttctctctctctctctctctctctctctctccctctcccccccgttccccactcttcctttctcctttgctttttcttctctttcatacatatatgcgtgcctagttctaggaggaaacgggttaaaaattgttttaaactacatcttgaaaatattgaagaatttgttttaggtagagtggtcagttgaaccttacagtaaagtatagaaatatatttaatgtggaatgtcaatgccaggatttctcattaacaatattttatctcaactttggttcctgtgatacatttctgaatgggcaattccagaaatcttagtagcccatgttaagcttctattttttacttgttttcggggagaaataagaattagacatcttcagatttaagttaaataatcccattctttataatcctctgtaaaaagatccctgagattattccttcttctagttttatgcgacagctttactttaaaattcaagttatacatcttgggagtacaatggcccgacatttcttcataggtagaaacaaatacttgactcagtgatactcatgaccattagaatagtcatacctggaatgtgtcaaattataagagacagacacttggttagtggctgcctcatatagcacttttgaagaggcctaagtcaaaacttgcaatataacattctattgactttcttaaaaatattttttctgtacctaacttgagcataagggttatttgagcaagtaacattaactcagtggaaggcattgtcctgtgaaatattcttaggcagatctgcccacatctttattgaacttgaaatctaatatttctagtatttgaacaaagcagaaggttaagtcagggaagagcagtgctgtccatgatgtaatggaagctaccaggggaggcagtgtctggatgatgctgtgctacctacccctgcacaagccatgctggctcagtctgagctgtgggccacatcagctagtggctcttctcatgcatcagttaggtgggtctgggtgagagttatagtgagggaatggtcactaaagtatcctgacaagttcctaggaaaaaaggaataaagtttttttccttaaaaaaaaaaaaattgctcttggctgtgaaaagaggtactaaatgcgattcagttcaccgctaaggaaagtgatgacatagcagttacagagggtgataaatctctccagctaattcaggtcattttgtgaatactatgtatcaagccctgaaaatatggtaaataaaacgtgacagggaaacctttttttgattgaatattgttacatagttaaatgtgctatatatccttaatattttatattgatcctgcaaaatctgttggttttaggggagttttgttttttgtttctaacaattttcagacctgttggtataggaatgtagaagtctttcagatgatttgaaagcagctgcatttgctcttggaggctttgggagagcaggaatgaaaacattcagaggaagacatctgtagggaattcttctgttacttaccaaagaataagtgtctttctggtgttttatttcctatcataaaaatacaacagtgcatttacaaggttaaagattcctcgaagttctaggaaattcttgaaaatataagtggtgcttagaaaattcaagcatttaggaatgtgacctttaattcaggtatgtaaaagacttttttcccaaacttttaaaagtaggaaatacaataaatacagaaaagtcatatggttgaataaataattataaattgagcactgatggaatccctctacaggtcaagaaatagcgcagtgtcctggatgcccattatattgttttctcctttctgggtaacaagccctaacttctgtaatttaaaagctcctacttttgccacaaggtggtgcttctgccattagacgcagttaggaggatgcaactgcaaatctaaaattacgaagttagtgtagttgcaataaacttagaacatatgcattaatactaaacctatgcagtaataccataattagccttctaatcatgtaatttgctttacttaggtatttcatttggttcagcctgttatggaatttaccagcttgataaatttgcctataaagttttataaagaaaaggaatattttgttttcataaagaggaaaatccattcttagaaaaaaa

SEQ ID NO: 149 - DNA, 3411 bp, Homo sapiens
gcagccgagcagcctggcaacggcggtggcgcccggagcccgagagtttccaggatggcttctgcatcaacttctaaatataattcacactccttggagaatgagtctattaagaggacgtctcgagatggagtcaatcgagatctcactgaggctgttcctcgacttccaggagaaacactaatcactgacaaagaagttatttacatatgtcctttcaatggccccattaagggaagagtttacatcacaaattatcgtctttatttaagaagtttggaaacggattcttctctaatacttgatgttcctctgggtgtgatctcgagaattgaaaaaatgggaggcgcgacaagtagaggagaaaattcctatggtctagatattacttgtaaagacatgagaaacctgaggttcgctttgaaacaggaaggccacagcagaagagatatgtttgagatcctcacgagatacgcgtttcccctggctcacagtctgccattatttgcatttttaaatgaagaaaagtttaacgtggatggatggacagtttacaatccagtggaagaatacaggaggcagggcttgcccaatcaccattggagaataacttttattaataagtgctatgagctctgtgacacttaccctgctcttttggtggttccgtatcgtgcctcagatgatgacctccggagagttgcaacttttaggtcccgaaatcgaattccagtgctgtcatggattcatccagaaaataagacggtcattgtgcgttgcagtcagcctcttgtcggtatgagtgggaaacgaaataaagatgatgagaaatatctcgatgttatcagggagactaataaacaaatttctaaactcaccatttatgatgcaagacccagcgtaaatgcagtggccaacaaggcaacaggaggaggatatgaaagtgatgatgcatatcataacgccgaacttttcttcttagacattcataatattcatgttatgcgggaatctttaaaaaaagtgaaggacattgtttatcctaatgtagaagaatctcattggttgtccagtttggagtctactcattggttagaacatatcaagctcgttttgacaggagccattcaagtagcagacaaagtttcttcagggaagagttcagtgcttgtgcattgcagtgacggatgggacaggactgctcagctgacatccttggccatgctgatgttggatagcttctataggagcattgaagggttcgaaatactggtacaaaaagaatggataagttttggacataaatttgcatctcgaataggtcatggtgataaaaaccacaccgatgctgaccgttctcctatttttctccagtttattgattgtgtgtggcaaatgtcaaaacagttccctacagcttttgaattcaatgaacaatttttgattataattttggatcatctgtatagttgccgatttggtactttcttattcaactgtgaatctgctcgagaaagacagaaggttacagaaaggactgtttctttatggtcactgataaacagtaataaagaaaaattcaaaaaccccttctatactaaagaaatcaatcgagttttatatccagttgccagtatgcgtcacttggaactctgggtgaattactacattagatggaaccccaggatcaagcaacaacagccgaatccagtggagcagcgttacatggagctcttagccttacgcgacgaatacataaagcggcttgaggaactgcagctcgccaactctgccaagctttctgatcccccaacttcaccttccagtccttcgcaaatgatgccccatgtgcaaactcacttctgaggggggaccctggcaccgcattagagctcgaaataaaggcgatagctgactttcatttggggcatttgtaaaaagtagattaaaatatttgcctccatgtagaacttgaactaacataatcttaaactcttgaatatgtgccttctagaatacatattacaagaaaactacagggtccacacggcaatcagaagaaaggagctgagatgaggttttggaaaaccctgacacctttaaaaagcagtttttgaaagacaaaatttagatttaatttacgtcttgagaaatactatatatacaatatatatggggggggcttaattgaaacaacattattttaaaatcaaaggggatatatgtttgtggaatggattttcctgaagctgcttaacagttgctttggattctctaagatgaatccaaatgtgaaagatgcatgttactgccaaaaccaaattgagctcagcttcctaggcattacccaaaagcaaggtgtttaagtaattgccagcttttataccatcatgagtggtgacttaaggagaaatagctgtatagatgagtttttcattatttggaaatttaggggtagaaaatgttttcccctaattttccagagaagcctatttttatatttttaaaaaactgacagggcccagttaaatatgatttgcattttttaaatttgccagttttattttctaaattctttcatgagcttgcctaaaattcggaatggttttcgggttgtggcaaaccccaaagagagcactgtccaaggatgtcgggagcatcctgctgcttaggggaatgttttcgcaaatgttgctctagtcagtccagctcatctgccaaaatgtagggctaccgtcttggatgcatgagctattgctagagcatcatccttagaaatcagtgccccagatgtacatgtgttgagcgtattcttgaagtattgtgtttatgcatttcaatttcaatggtgttggcttcccctccccaccccacgcgtgcataaaaactggttctacaaatttttacttgaagtaccaggccgtttgctttttcaggttgttttgttttatagtattaagtgaaattttaaatgcacagttctatttgctatctgaactaattcatttattaagtatatttgtaaaagctaaggctcgagttaaaacaatgaagtgttttacaatgatttgtaaaggactatttataactaatatggttttgttttcaatgaattaagaaagattaaatatatctttgtaaattattttatgtcatagtttaattggtctcccaagtaagacatctcaaatacagtagtataatgtatgaattttgtaagtataagaaattttattagacattctcttactttttgtaaatgctgtaaatatttcataaattaacaaagtgtcactccataaaaagaaagctaatactaatagcctaaaagattttgtgaaatttcatgaaaactttttaatggcaataatgactaaagacctgctgtaataaatgtattaactgaaacct

SEQ ID NO: 150 - DNA, 2290 bp, Homo sapiens
gtgggacaaagcctggggctgggcgggggccatggcgctgccatcccgaatcctgctttggaaacttgtgcttctgcagagctctgctgttctcctgcactcagggtcctcggtacccgccgctgctggcagctccgtggtgtccgagtccgcggtgagctgggaggcgggcgcccgggcggtgctgcgctgccagagcccgcgcatggtgtggacccaggaccggctgcacgaccgccagcgcgtgctccactgggacctgcgcggccccgggggtggccccgcgcggcgcctgctggacttgtactcggcgggcgagcagcgcgtgtacgaggcgcgggaccgcggccgcctggagctctcggcctcggccttcgacgacggcaacttctcgctgctcatccgcgcggtggaggagacggacgcggggctgtacacctgcaacctgcaccatcactactgccacctctacgagagcctggccgtccgcctggaggtcaccgacggccccccggccacccccgcctactgggacggcgagaaggaggtgctggcggtggcgcgcggcgcacccgcgcttctgacctgcgtgaaccgcgggcacgtgtggaccgaccggcacgtggaggaggctcaacaggtggtgcactgggaccggcagccgcccggggtcccgcacgaccgcgcggaccgcctgctggacctctacgcgtcgggcgagcgccgcgcctacgggcccctttttctgcgcgaccgcgtggctgtgggcgcggatgcctttgagcgcggtgacttctcactgcgtatcgagccgctggaggtcgccgacgagggcacctactcctgccacctgcaccaccattactgtggcctgcacgaacgccgcgtcttccacctgacggtcgccgaaccccacgcggagccgcccccccggggctctccgggcaacggctccagccacagcggcgccccaggcccagaccccacactggcgcgcggccacaacgtcatcaatgtcatcgtccccgagagccgagcccacttcttccagcagctgggctacgtgctggccacgctgctgctcttcatcctgctactggtcactgtcctcctggccgcccgcaggcgccgcggaggctacgaatactcggaccagaagtcgggaaagtcaaaggggaaggatgttaacttggcggagttcgctgtggctgcaggggaccagatgctttacaggagtgaggacatccagctagattacaaaaacaacatcctgaaggagagggcggagctggcccacagccccctgcctgccaagtacatcgacctagacaaagggttccggaaggagaactgcaaatagggaggccctgggctcctggctgggccagcagctgcacctctcctgtctgtgctcctcggggcatctcctgatgctccggggctcaccccccttccagcggctggtcccgctttcctggaatttggcctgggcgtatgcagaggccgcctccacacccctcccccaggggcttggtggcagcatagcccccacccctgcggcctttgctcacgggtggccctgcccacccctggcacaaccaaaatcccactgatgcccatcatgccctcagacccttctgggctctgcccgctgggggcctgaagacattcctggaggacactcccatcagaacctggcagccccaaaactggggtcagcctcagggcaggagtcccactcctccagggctctgctcgtccggggctgggagatgttcctggaggaggacactcccatcagaacttggcagccttgaagttggggtcagcctcggcaggagtcccactcctcctggggtgctgcctgccaccaagagctcccccacctgtaccaccatgtgggactccaggcaccatctgttctccccagggacctgctgacttgaatgccagcccttgctcctctgtgttgctttgggccacctggggctgcaccccctgccctttctctgccccatccctaccctagccttgctctcagccaccttgatagtcactgggctccctgtgacttctgaccctgacacccctcccttggactctgcctgggctggagtctagggctggggctacatttggcttctgtactggctgaggacaggggagggagtgaagttggtttggggtggcctgtgttgccactctcagcaccccacatttgcatctgctggtggacctgccaccatcacaataaagtccccatctgatttttaaaaaaaaaaaaaaaaaa

SEQ ID NO: 151 - DNA, 4871 bp, Homo sapiens
ccgcagggtagggtgcgggaccggggggacctggaggcagaggggagaaccggccgtccgcgccgcagcacagccgctgggagcgcctcagaccccgcgcggggcgccggctccatggcgaccgggctcggggagccggtctatggactttccgaagacgagggagagtcccgtattctcagagtaaaagttgtttctggaattgatctcgccaaaaaggacatctttggagccagtgatccgtatgtgaaactttcattgtacgtagcggatgagaatagagaacttgctttggtccagacaaaaacaattaaaaagacactgaacccaaaatggaatgaagaattttatttcagggtaaacccatctaatcacagactcctatttgaagtatttgacgaaaatagactgacacgagacgacttcctgggccaggtggacgtgccccttagtcaccttccgacagaagatccaaccatggagcgaccctatacatttaaggactttctcctcagaccaagaagtcataagtctcgagttaagggatttttgcgattgaaaatggcctatatgccaaaaaatggaggtcaagatgaagaaaacagtgaccagagggatgacatggagcatggatgggaagttgttgactcaaatgactcggcttctcagcaccaagaggaacttcctcctcctcctctgcctcccgggtgggaagaaaaagtggacaatttaggccgaacttactatgtcaaccacaacaaccggaccactcagtggcacagaccaagcctgatggacgtgtcctcggagtcggacaataacatcagacagatcaaccaggaggcagcacaccggcgcttccgctcccgcaggcacatcagcgaagacttggagcccgagccctcggagggcggggatgtccccgagccttgggagaccatttcagaggaagtgaatatcgctggagactctctcggtctggctctgcccccaccaccggcctccccaggatctcggaccagccctcaggagctgtcagaggaactaagcagaaggcttcagatcactccagactccaatggggaacagttcagctctttgattcaaagagaaccctcctcaaggttgaggtcatgcagtgtcaccgacgcagttgcagaacagggccatctaccaccgccatcagtggcctatgtacataccacgccgggtctgccttcaggctgggaagaaagaaaagatgctaaggggcgcacatactatgtcaatcataacaatcgaaccacaacttggactcgacctatcatgcagcttgcagaagatggtgcgtccggatcagccacaaacagtaacaaccatctaatcgagcctcagatccgccggcctcgtagcctcagctcgccaacagtaactttatctgccccgctggagggtgccaaggactcacccgtacgtcgggctgtgaaagacaccctttccaacccacagtccccacagccatcaccttacaactcccccaaaccacaacacaaagtcacacagagcttcttgccacccggctgggaaatgaggatagcgccaaacggccggcccttcttcattgatcataacacaaagactacaacctgggaagatccacgtttgaaatttccagtacatatgcggtcaaagacatctttaaaccccaatgaccttggcccccttcctcctggctgggaagaaagaattcacttggatggccgaacgttttatattgatcataatagcaaaattactcagtgggaagacccaagactgcagaacccagctattactggtccggctgtcccttactccagagaatttaagcagaaatatgactacttcaggaagaaattaaagaaacctgctgatatccccaataggtttgaaatgaaacttcacagaaataacatatttgaagagtcctatcggagaattatgtccgtgaaaagaccagatgtcctaaaagctagactgtggattgagtttgaatcagagaaaggtcttgactatgggggtgtggccagagaatggttcttcttactgtccaaagagatgttcaacccctactacggcctctttgagtactctgccacggacaactacacccttcagatcaaccctaattcaggcctctgtaatgaggatcatttgtcctacttcacttttattggaagagttgctggtctggccgtatttcatgggaagctcttagatggtttcttcattagaccattttacaagatgatgttgggaaagcagataaccctgaatgacatggaatctgtggatagtgaatattacaactctttgaaatggatcctggagaatgaccctactgagctggacctcatgttctgcatagacgaagaaaactttggacagacatatcaagtggatttgaagcccaatgggtcagaaataatggtcacaaatgaaaacaaaagggaatatatcgacttagtcatccagtggagatttgtgaacagggtccagaagcagatgaacgccttcttggagggattcacagaactacttcctattgatttgattaaaatttttgacgaaaatgagctggagttgctcatgtgcggcctcggtgatgtggatgtgaatgactggagacagcattctatttacaagaacggctactgcccaaaccaccccgtcattcagtggttctggaaggctgtgctactcatggacgccgaaaagcgtatccggttactgcagtttgtcacagggacatcgcgagtacctatgaatggatttgccgaactttatggttccaatggtcctcagctgtttacaatagagcaatggggcagtcctgagaaactgcccagagctcacacatgctttaatcgccttgacttacctccatatgaaacctttgaagatttacgagagaaacttctcatggccgtggaaaatgctcaaggatttgaaggggtggattaagcaccctgtgcctcgggggtggttgttcttcaagcaagttctgcttgcacttttgcatttgcctaacagacttttgcagaggcgatggcagagagcagctgcaggcatggtccctggagccgagccttcaccacgcactcgtccaagttcggatgcgggaacctggtcccagcttgagttcctgcctttcccaccacaaattatcaactggttgatgtgtacactaattacatttcaggaggacttaatgctatttatgttgtgcctctgcaggcaaagcccttaataaatattttacatcctttctaatgacaatgaatggaattaatcactcaacaggtatagtattacgactcatgtttactttttaaaatgatttagaccgattttcagattttatttcgttatgattaaagatgtctcatgtacttggaaaagtgagcatttttttttttttttgtatttcactttcataccaggcttaatgtcaatgacatttttatttttgaagtactctgacacctccaccctctactttattagaattggaaggcaaatttttgtccaaaaacctacagacaagtactttgagagaatttccaatataatattagacataatgataattttttccatactcagaatgaaaaactggatattacgtttttgttttggggtttttttgtacaaatttagctaatagctacaggctgagagaattgtaacatagcatgacaaattttgtgttgacttgaaaggaatcacaccattattccttagaagtaattacatgtgttctaacacatttgagacagggttggactcccatttctcatccgagaaattacttaacccttcctggcgctgtacagtcatcttttattctatttcctctttgctgtttgtagtagagacattttgaatgaaacttggcactgcttgattcaaaactgtggaaaccagatctgtttagtctcctgtttgtatgcgtttgctaatggtagctaaataaccagtttttgttgtaaatgcaccaattctgaaggcactttatgtactacatggaggtcatatctggttttgtttttatttttttatcatgaacattaaatgtgatgatgatttcttttccctgcacacatctttccggtgcaatatctatcaattgtgaatctggctgctggtgtataaaaacctggatgtaaagctgagcctacagacctgtcctcaccaactgttttgtgatttctactcaactacaaagatttatttaatgtactcttaatctaactgagttttgttaccaatgacctgttgcatgcttcaataccgtgtactgcctgagttgtgcctcttgtgtgctagattaaaagtgagacagagacttgacttgatcctctgagctcaagctattgagctggtagtggcagaggactgagggtacctgcacagtttgattcttttccacgtgtaagtctccattgcagaattgtcgtgctttgagaaaacacctgaggcagtgtgggagttgaacgaccctgctgtcctttttaacctgtgttgtcctagaccctgtcggggcagtcaggggacactagagatttgatctcatgcgagtcatcaataggacaaaaaagttgtggtttggggaggtctgtttgttacataaaaaggacctttcggtgtaagaaattgccgtttttaccctgccctggctggcatgtgagaagccatggaaggttgtggttgtaaatgagttgtctaaaggggtgcagaggcctgaggtttctaaaagaaggtagatttctacagagctgagtgttggttcctttttcttattggttgaaaattacctggtagtgatcagaaaacttagatgctatgtaact

SEQ ID NO: 152 - DNA, 2130 bp, Homo sapiens
ggttaaacggggcccaaggcaggggtggcgggtcagtgctgctcgggggcttctccatccaggtccctggagttcctggtccctggagctccgcacttggcggcgcaacctgcgtgaggcagcgcgactctggcgactggccggccatgccttcccgggctgaggactatgaagtgttgtacaccattggcacaggctcctacggccgctgccagaagatccggaggaagagtgatggcaagatattagtttggaaagaacttgactatggctccatgacagaagctgagaaacagatgcttgtttctgaagtgaatttgcttcgtgaactgaaacatccaaacatcgttcgttactatgatcggattattgaccggaccaatacaacactgtacattgtaatggaatattgtgaaggaggggatctggctagtgtaattacaaagggaaccaaggaaaggcaatacttagatgaagagtttgttcttcgagtgatgactcagttgactctggccctgaaggaatgccacagacgaagtgatggtggtcataccgtattgcatcgggatctgaaaccagccaatgttttcctggatggcaagcaaaacgtcaagcttggagactttgggctagctagaatattaaaccatgacacgagttttgcaaaaacatttgttggcacaccttattacatgtctcctgaacaaatgaatcgcatgtcctacaatgagaaatcagatatctggtcattgggctgcttgctgtatgagttatgtgcattaatgcctccatttacagcttttagccagaaagaactcgctgggaaaatcagagaaggcaaattcaggcgaattccataccgttactctgatgaattgaatgaaattattacgaggatgttaaacttaaaggattaccatcgaccttctgttgaagaaattcttgagaaccctttaatagcagatttggttgcagacgagcaaagaagaaatcttgagagaagagggcgacaattaggagagccagaaaaatcgcaggattccagccctgtattgagtgagctgaaactgaaggaaattcagttacaggagcgagagcgagctctcaaagcaagagaagaaagattggagcagaaagaacaggagctttgtgttcgtgagagactagcagaggacaaactggctagagcagaaaatctgttgaagaactacagcttgctaaaggaacggaagttcctgtctctggcaagtaatccagaacttcttaatcttccatcctcagtaattaagaagaaagttcatttcagtggggaaagtaaagagaacatcatgaggagtgagaattctgagagtcagctcacatctaagtccaagtgcaaggacctgaagaaaaggcttcacgctgcccagctgcgggctcaagccctgtcagatattgagaaaaattaccaactgaaaagcagacagatcctgggcatgcgctagccaggtagagagacacagagctgtgtacaggatgtaatattaccaacctttaaagactgatattcaaatgctgtagtgttgaatacttggttccatgagccatgcctttctgtatagtacacatgatatttcggaattggttttactgttcttcagcaactattgtacaaaatgttcacatttaatttttctttcttcttttaagaacatattataaaaagaatactttcttggttgggcttttaatcctgtgtgtgattactagtaggaacatgagatgtgacattctaaatcttgggagaaaaaataatgttaggaaaaaaatatttatgcaggaagagtagcactcactgaatagttttaaatgactgagtggtatgcttacaattgtcatgtctagatttaaattttaagtctgagattttaaatgtttttgagcttagaaaacccagttagatgcaatttggtcattaataccatgacatcttgcttataaatattccattgctctgtagttcaaatctgttagctttgtgaaaattcatcactgtgatgtttgtattctttttttttttctgtttaacagaatatgagctgtctgtcatttacctacttctttcccactaaataaaagaattcttcagtt

SEQ ID NO: 153 - DNA, 2104 bp, Homo sapiens
acgtagcgcggcgctcggaactgacctactaacacacatctctccgcgcggccacggcgcccgcggacccggcgcgcccgcccgcctcccgcgccgcgccctcgccgccgcccgcctcccgccgcggccccggaggcccggcccggcccgagccccgagcgccggcggcccgactcccggccgcccctttctttctcctcgccggcccgagagcaggaacacgataacgaaggaggcccaacttcattcaataaggagcctgacggatttatcccagacggtagaacaaaaggaagaatattgatggattttaaaccagagtttttaaagagcttgagaatacggggaaattaatttgttctcctacacacatagatagggtaaggttgtttctgatgcagctgagaaaaatgcagaccgtcaaaaaggagcaggcgtctcttgatgccagtagcaatgtggacaagatgatggtccttaattctgctttaacggaagtgtcagaagactccacaacaggtgaggagctgcttctcagtgaaggaagtgtggggaagaacaaatcttctgcatgtcggaggaaacgggaattcattcctgatgaaaagaaagatgctatgtattgggaaaaaaggcggaaaaataatgaagctgccaaaagatctcgtgagaagcgtcgactgaatgacctggttttagagaacaaactaattgcactgggagaagaaaacgccactttaaaagctgagctgctttcactaaaattaaagtttggtttaattagctccacagcatatgctcaagagattcagaaactcagtaattctacagctgtgtactttcaagattaccagacttccaaatccaatgtgagttcatttgtggacgagcacgaaccctcgatggtgtcaagtagttgtatttctgtcattaaacactctccacaaagctcgctgtccgatgtttcagaagtgtcctcagtagaacacacgcaggagagctctgtgcagggaagctgcagaagtcctgaaaacaagttccagattatcaagcaagagccgatggaattagagagctacacaagggagccaagagatgaccgaggctcttacacagcgtccatctatcaaaactatatggggaattctttctctgggtactcacactctcccccactactgcaagtcaaccgatcctccagcaactccccgagaacgtcggaaactgatgatggtgtggtaggaaagtcatctgatggagaagacgagcaacaggtccccaagggccccatccattctccagttgaactcaagcatgtgcatgcaactgtggttaaagttccagaagtgaattcctctgccttgccacacaagctccggatcaaagccaaagccatgcagatcaaagtagaagcctttgataatgaatttgaggccacgcaaaaactttcctcacctattgacatgacatctaaaagacatttcgaactcgaaaagcatagtgccccaagtatggtacattcttctcttactcctttctcagtgcaagtgactaacattcaagattggtctctcaaatcggagcactggcatcaaaaagaactgagtggcaaaactcagaatagtttcaaaactggagttgttgaaatgaaagacagtggctacaaagtttctgacccagagaacttgtatttgaagcaggggatagcaaacttatctgcagaggttgtctcactcaagagacttatagccacacaaccaatctctgcttcagactctgggtaaattactactgagtaagagctgggcatttagaaagatgtcatttgcaatagagcagtccattttgtattatgctgaattttcactggacctgtgatgtcatttcactgtgatgtgcacatgttgtctgtttggtgtctttttgtgcacagattatgatgaagattagattgtgttatcactctgcctgtgtatagtcagatagtccatgcgaaggctgtatatattgaacattatttttgttgttctattataaagtgtgtaagttaccagtttcaataaaggattggtgacaaacacagaaaaaaaaaaaaaaaaaaaaa

SEQ ID NO: 154 - DNA, 1031 bp, Homo sapiens
gcagaagcgttccgtgcgtgcaagtgctgcgaaccacgtgggtcccgggcgcgtttcgggtgctggcggctgcagccggagttcaaacctaagcagctggaagggccctgtggctaggtaccatagagtctctacacaggactaagtcagcctggtgtgcaggggaggcagacacacaaacagaaaattggactacagtgctaagatgctgtaagaagaggttaactaaaggacaggaagatggggccaagagatggtgctactgtctactttagggatcgtctttcaaggcgaggggcctcctatctcaagctgtgatacaggaaccatggccaactgtgagcgtaccttcattgcgatcaaaccagatggggtccagcggggtcttgtgggagagattatcaagcgttttgagcagaaaggattccgccttgttggtctgaaattcatgcaagcttccgaagatcttctcaaggaacactacgttgacctgaaggaccgtccattctttgccggcctggtgaaatacatgcactcagggccggtagttgccatggtctgggaggggctgaatgtggtgaagacgggccgagtcatgctcggggagaccaaccctgcagactccaagcctgggaccatccgtggagacttctgcatacaagttggcaggaacattatacatggcagtgattctgtggagagtgcagagaaggagatcggcttgtggtttcaccctgaggaactggtagattacacgagctgtgctcagaactggatctatgaatgacaggagggcagaccacattgcttttcacatccatttcccctccttcccatgggcagaggaccaggctgtaggaaatctagttatttacaggaacttcatcataatttggagggaagctcttggagctgtgagttctccctgtacagtgttaccatccccgaccatctgattaaaatgcttcctcccagcataggattcattgagttggttacttcatattgttgcattgcttttttttccttct

SEQ ID NO: 155 - DNA, 2389 bp, Homo sapiens
gggaaggcgagcagtgccaatctacagcgaagaaagtctcgtttggtaaaagcgagaggggaaagcctgagcatgcagagtgtgcagagcacgagcttttgtctccgaaagcagtgcctttgcctgaccttcctgcttctccatctcctgggacaggtcgctgcgactcagcgctgccctccccagtgcccgggccggtgccctgcgacgccgccgacctgcgcccccggggtgcgcgcggtgctggacggctgctcatgctgtctggtgtgtgcccgccagcgtggcgagagctgctcagatctggagccatgcgacgagagcagtggcctctactgtgatcgcagcgcggaccccagcaaccagactggcatctgcacggcggtagagggagataactgtgtgttcgatggggtcatctaccgcagtggagagaaatttcagccaagctgcaaattccagtgcacctgcagagatgggcagattggctgtgtgccccgctgtcagctggatgtgctactgcctgagcctaactgcccagctccaagaaaagttgaggtgcctggagagtgctgtgaaaagtggatctgtggcccagatgaggaggattcactgggaggccttacccttgcagcttacaggccagaagccaccctaggagtagaagtctctgactcaagtgtcaactgcattgaacagaccacagagtggacagcatgctccaagagctgtggtatggggttctccacccgggtcaccaataggaaccgtcaatgtgagatgctgaaacagactcggctctgcatggtgcggccctgtgaacaagagccagagcagccaacagataagaaaggaaaaaagtgtctccgcaccaagaagtcactcaaagccatccacctgcagttcaagaactgcaccagcctgcacacctacaagcccaggttctgtggggtctgcagtgatggccgctgctgcactccccacaataccaaaaccatccaggcagagtttcagtgctccccagggcaaatagtcaagaagccagtgatggtcattgggacctgcacctgtcacaccaactgtcctaagaacaatgaggccttcctccaggagctggagctgaagactaccagagggaaaatgtaacctatcactcaagaagcacacctacagagcacctgtagctgctgcgccacccaccatcaaaggaatataagaaaagtaatgaagaatcacgatttcatccttgaatcctatgtattttcctaatgtgatcatatgaggacctttcatatctgtcttttatttaacaaaaaatgtaattaactgtaaacttggaatcaaggtaagctcaggatatggcttaggaatgacttactttcctgtggttttattacaaatgcaaatttctataaatttaagaaaacaagtatataatttactttgtagactgtttcacattgcactcatcatattttgttgtgcactagtgcaattccaagaaaatatcactgtaatgagtcagtgaagtctagaatcatacttaacatttcattgtacaagtattacaaccatatattgaggttcattgggaagattctctattggctccctttttgggtaaaccagctctgaacttccaagctccaaatccaaggaaacatgcagctcttcaacatgacatccagagatgactattacttttctgtttagttttacactaggaaacgtgttgtatctacagtaatgaaatgtttactaagtggactggtgtcataaactttctccatttaagacacattgactcctttccaatagaaagaaactaaacagaaaactcccaatacaaagatgactggtccctcatagccctcagacatttatatattggaagctgctgaggcccccaagttttttaattaagcagaaacagcatattagcagggattctctcatctaactgatgagtaaactgaggcccaaagcacttgcttacatcctctgatagctgtttcaaatgtgcattttgtggaattttgagaaaaatagagcaaaatcaacatgactggtggtgagagaccacacattttatgagagtttggaattattgtagacatgcccaaaacttatccttgggccataattatgaaaactcatgatcaagatatatgtgtatacatacatgtatctggtttgtcaggctacaaggtaggctgcaaaattaaatctagacattcttttaatgccaccacacgtgttccgcttctctcttttaaagtatttataaaaatataaattgtacattttgtaaaatattatgtttgatttctctacttgtcatatcactaaataaacacgattttattgctgaaaaaaaaaaaaaaaaaaa

SEQ ID NO: 156 - DNA, 6237 bp, Homo sapiens
ctaagatggcgacgcctttggcggtaaattcggctgctagtctatggggtccttacaaagacatttggcataaagtgggaaatgctctttggagaagacaacctgaagctgttcaccttcttgataagattttgaagaaacacaaacctgacttcatctcattgttcaaaaatccgccaaaaaatgttcaacagcatgagaaggttcagaaagccagtacagagggagtcgccattcagggtcaacagggaactcgacttcttcctgaacagctcattaaagaagcctttattctcagtgacctttttgatattggagaattggcagctgttgagcttcttcttgctggagagcatcaacagccacattttcctggccttaccagaggattagtagctgttcttctgtactgggatggaaagcgatgcattgcgaattccttgaaagccttgatacagtctagacggggaaagacatggaccctagaactcagtccagagctggcttccatgacaacacgctttacagatgagctgatggagcaaggattgacttataaagttcttacgctggtgtcacagattgatgtgaataatgagtttgagaaactacagcgagagagaggtttgggcagtgaaaaacatcgcaaagaggtttctgatctcattaaggagtgcaggcagtctcttgcagaaagcctttttgcctgggcttgccagtcacctttaggcaaagaagacactctcctcctcattggacatttggaaagagtgacagttgaggctaatggctcactggatgcagtgaatctggctcttcttatggcgcttctatactgttttgatatcagttttatagagcaaagcacagaggaacgagatgatatgattcatcaacttccactgttgacagaaaaacagtacattgcaacaattcactctcgtcttcaggactcacagctttggaaactgcctgggctccaagccactgttagacttgcctgggcgctggcattgaggggaatatcccagctacctgatgtgacagctctggcagaattcacagaggcagatgaagcaatggcagaactcgcaattgctgacaacgttttcctgttcctcatggaatctgtagtggtatcagaatacttttatcaggaagaattttatattcgcagagtccataatctcatcacagatttccttgcacttatgccaatgaaggtgaaacagctgaggaatcgggcagatgaagatgctcgaatgattcacatgagtatgcagatgggtaatgaaccccccatttcacttagaagggacctggaacacttaatgcttttgattggcgagctatataaaaagaacccttttcatctggagcttgctctagaatattggtgtcccacagagcctcttcagactccgactatcatgggctcttatctaggggtggctcatcagcggccccctcaacgccaggttgtcttgtcaaagtttgttaggcaaatgggtgacctgttgcctccaactatttatattccttatttgaagatgctccagggattggccaatgggcctcagtgtgcccactactgtttcagcctgctcaaagtcaatggtagtagtcatgttgaaaatattcagggagcaggtggcagtcctgtttcctgggaacatttctttcactccttgatgctttaccacgaacaccttcggaaggatcttccaagtgcagatagtgtccagtaccgtcaccttccttcccgtggcatcacccagaaggagcaagatggattgattgcttttttgcagctcacgtctaccatcattacttggagtgaaaatgctcgcttggccctctgtgaacaccctcagtggacccctgttgtggtgattctgggactcctccaatgcagtattccccctgtcctaaaagctgagctactgaagacactcgcagcttttggaaaatctcctgaaattgctgcttccctctggcagtcattggaatacactcagatactgcagaccgtgaggattccaagccaaaggcaagctattggtattgaggttgaactaaatgaaatagaatcccggtgtgaagaatacccattgactcgggccttttgccagcttattagtactctggtggagagctcatttccttctaatttgggtgctggactgcggccccctggctttgacccttatttgcagttccttagagactctgtgtttctacgattccgtacaagagcttaccggagagcagctgaaaagtgggaagttgctgaggtggttttggaggtgttttataaattgctcagagattatgagcctcagcttgaagattttgtagaccagtttgtggaactacaaggagaagaaatcatagcctataagccacctggatttagtctgatgtatcatctgctgaatgagtcaccaatgttggagcttgctctcagtttactggaagaaggagttaagcagcttgacacctatgccccctttcctgggaaaaaacacctggagaaagcagtacagcattgccttgcacttctcaatcttactctgcaaaaggaaaatctttttatggaccttctaagagagagtcaactggctctaatagtctgtcctttagaacagcttttgcagggaattaatcccagaactaagaaggcagataatgtggtaaacattgccagatacctatatcatggcaatactaatccagaattggcttttgaaagtgccaagatcctctgttgtatctcttgcaactctaatattcagataaagttggttggagatttcacacatgaccagagtataagtcagaaactaatggctggatttgtggagtgtttggattgtgaagatgcagaagaatttgtacgtctggaagagggatcagaacttgaaaagaaattagttgcaattcgtcatgaaacaagaatccacatcttgaatcttctcattacctctctggaatgcaatccacccaatcttgctctctacctgttgggctttgaattgaaaaaacctgtcagtactacaaacctacaagatccaggagtgttaggttgccctcggacatgccttcacgccattctaaacatcttggagaaaggaacggaagggagaacaggcccagtggcggtgcgagaatctcctcagctggctgagctatgttaccaggtcatatatcagttatgtgcatgctctgatacatctggtcctactatgaggtacttgagaaccagccaggatttcttattttcccagttgcagtatctaccattttctaacaaagaatatgaaatatctatgctgaaccagatgtcatggcttatgaaaactgcctcaatagagctaagggtaacctctctgaatcgtcagcggtcacatacccagaggctcctacacctcttactggatgacatgccagtgaaaccatactcagatggtgaaggaggaatagaagatgaaaacaggtctgtttctgggttccttcactttgacactgctacaaaagtacgtcgaaaaattctaaatattcttgactcgattgacttcagtcaggagatccctgagcctttgcagttggatttttttgatcgggcccagattgaacaagttattgctaactgtgaacacaagaatttacggggacagacagtctgcaatgtcaagcttcttcatagggttcttgtagctgaagtaaatgcccttcagggtatggcagccataggacagagacctctactaatggaggaaatcagcactgtacttcagtatgtggtaggaagaaataaattgctgcagtgtcttcatgcaaaacgtcatgctctggagtcgtggaggcaactagtagaaattatactgacagcttgtccccaggacctcattcaggcagaggatcgacaactgattattcgtgatattttacaagatgtgcatgataagatactggatgatgaagctgcgcaagagttaatgcctgtggtcgccggggcagtgttcacactgactgctcacctaagccaggccgtcctcactgaacagaagcaaacatcagtcttgggaccagcagaggcccattacgcttttatgcttgatagttgcttcacctcacctcctcctgaagagaacccattagtgggttttgcttctattggagattcttcactttacatcatattgaagaaactgttagacttcattttgaagacaggtggtggattccaacgagtgaggactcacttgtatggctctctgctttattacttacagattgcccagagacctgatgaaccagacaccttagaagcagccaagaaaaccatgtgggaaaggctgacagcccctgaagatgtatttagcaaattacagcgagaaaacatagccattattgaaagttatggcgccgccctcatggaagtggtctgtcgagatgcttgtgatggtcatgagattggaaggatgctggccctggctctacttgatagaattgtctccgtggataaacagcagcagtggcttttgtatctttctaacagtggctacttgaaggtcctcgtagacagcttggtagaagatgaccgtactttgcagagcttactcaccccacagcctccccttttaaaagcactttatacttatgaatctaaaatggcatttctcacaagagtggcaaagatacagcagggtgcattagagctgctaagatcaggggtgattgtgagactagctcaatgccaagtctatgacatgcgcccagaaacggacccgcagagcatgtttggcatgagagaccctccaatgttcatccctaccccagtggatcgctaccgccagattctcctcccagctctccagctgtgccaggtcatcctcacatctagtatggcccagcacttgcaggcagcagggcaggtattgcagtttcttatttcacattctgataccatacaagcaattctgcgctgtcaggatgttagtgctgggtctttgcaggaattggctctgctgacaggaattataagtaaagcagcacttcctggaatattaagtgaacttgacgttgatgtaaatgaagggtctctaatggagctacagggacatattggaagattccagcgccagtgcttaggactactaagtcgctttggtggctctgacagactgcgtcagtttaaatttcaagacgataatgtggagggagataaagtaagcaagaaagatgagattgaactggctatgcagcagatttgtgccaatgtaatggaatattgccagtcactcatgttacagagttcccctaccttccagcatgctgtgtgtctcttcactcctagcctttcagaaacagttaatagagatggaccgcggcaagatacccaagctccagtggttccatactggcgcctgcctggtttaggcattatcatctacctgctgaaacagagtgctaatgatttcttcagctattatgacagtcatcgacagagtgtcagcaagctacaaaatgtagagcagcttcccccagatgagataaaagagttgtgtcagtctgtgatgcctgctggtgttgataaaatctccactgctcagaaatatgttctagcaagacggcgcttggtgaaggtgatcaacaatcgagctaaactgctttccctttgttcttttatcatagagacctgcctatttattctttggcgccatctggagtactacttgttacattgcatgcccacggattctcaagattccttatttgcctcgagaaccttgtttaaaagcagaagactgcaagattccttcgcctcagaaaccaatctagattttagaagtgggctggctatagtgagccaacatgatttagaccagcttcaggctgatgcaatcaacgcttttggagaatcactacaaaagaaacttctggacattgaaggattatattcaaaagttcgatctcgatatagtttcatacaggctcttgtcagacgtatccgtggcctcttgaggatatcaaggaactgagagcccgtgcttatgctcttctatgagagagatgaattggggagaattgtctccattttatagattagtttctttctaaattatgaccaaaaatattttgctatttctttctttgtatatggacatcttttctgtaaacttcttcccctagttccatcctcactagtaaaaaataaatactttttaaaaaaac

SEQ ID NO: 157 - DNA, 2674 bp, Homo sapiens; identical to SEQ ID NO: 40

SEQ ID NO: 158 - DNA, 2288 bp, Homo sapiens
aaagttaagagtggcgccagggatttgaaccgcgctgacgaagtttggtgatccatcttccgagtatcgccgggatttcgaatcgcgatgatcatcccctctctagaggagctggactccctcaagtacagtgacctgcagaacttagccaagagtctgggtctccgggccaacctgagggcaaccaagttgttaaaagccttgaaaggctacattaaacatgaggcaagaaaaggaaatgagaatcaggatgaaagtcaaacttctgcatcctcttgtgatgagactgagatacagatcagcaaccaggaagaagctgagagacagccacttggccatgtcaccaaaacaaggagaaggtgcaagactgtccgtgtggaccctgactcacagcagaatcattcagagataaaaataagtaatcccactgaattccagaatcatgaaaagcaggaaagccaggatctcagagctactgcaaaagttccttctccaccagacgagcaccaagaagctgagaatgctgtttcctcaggtaacagagattcaaaggtaccttcagaaggaaagaaatctctctacacagatgagtcatccaaacctggaaaaaataaaagaactgcaatcactactccaaactttaagaagcttcatgaagctcattttaaggaaatggagtccattgatcaatatattgagagaaaaaagaaacattttgaagaacacaattccatgaatgaactgaagcagcagcccatcaataagggaggggtcaggactccagtacctccaagaggaagactctctgtggcttctactcccatcagccaacgacgctcgcaaggccggtcttgtggccctgcaagtcagagtaccttgggtctgaaggggtcactcaagcgctctgctatctctgcagctaaaacgggtgtcaggttttcagctgctactaaagataatgagcataagcgttcactgaccaagactccagccagaaagtctgcacatgtgaccgtgtctgggggcaccccaaaaggcgaggctgtgcttgggacacacaaattaaagaccatcacggggaattctgctgctgttattaccccattcaagttgacaactgaggcaacgcagactccagtctccaataagaaaccagtgtttgatcttaaagcaagtttgtctcgtcccctcaactatgaaccacacaaaggaaagctaaaaccatgggggcaatctaaagaaaataattatctaaatcaacatgtcaacagaattaacttctacaagaaaacttacaaacaaccccatctccagacaaaggaagagcaacggaagaaacgcgagcaagaacgaaaggagaagaaagcaaaggttttgggaatgcgaaggggcctcattttggctgaagattaataattttttaacatcttgtaaatattcctgtattctcaacttttttccttttgtaaattttttttttttgctgtcatccccactttagtcacgagatctttttctgctaactgttcatagtctgtgtagtgtccatgggttcttcatgtgctatgatctctgaaaagacgttatcaccttaaagctcaaattctttgggatggtttttacttaagtccattaacaattcaggtttctaacgagacccatcctaaaattctgtttctagatttttaatgtcaagttcccaagttccccctgctggttctaatattaacagaactgcagtcttctgctagccaatagcatttacctgatggcagctagttatgcaagcttcaggagaatttgaacaataacaagaatagggtaagctgggatagaaaggccacctcttcactctctatagaatatagtaacctttatgaaacggggccatatagtttggttatgacatcaatattttacctaggtgaaattgtttaggcttatgtaccttcgttcaaatatcctcatgtaattgccatctgtcactcactatattcacaaaaataaaactctacaactcattctaacattgcttacttaaaagctacatagccctatcgaaatgcgaggattaatgctttaatgcttttagagacagggtctcactgtgttgcccaggctggtctcaaactccaccaaatgtacttcttattcattttatggaaaagactaggctttgcttagtatcatgtccatgtttccttcacctcagtggagcttctgagttttatactgctcaagatcgtcataaataaaattttttctcattgtcataaaaaaaaaaaaaa

SEQ ID NO: 159 - DNA, 2976 bp, Homo sapiens
ggctaatgcacagacatgaacatctattgaggaaaaccacaaaaaacttcaaaacagctacaacggtatcctaagaatatttcaattaaatattagtatgtctgctgaaggcactaattattaagaaacttaaaattatcaatctttcttgaatttctgatagagaagtaaaactattttccaaaactatttttcagaatgttcactgatacataaaaactgctagcatctaattaaagatcactaagggttaaatactgttctctggcccttactgcgcacaccctgccaaaacatcctctaagcttttaaatattgcttcgatggtctgaatttttatttccagggaaaaagagagttttgtcccacagtcagcaggccactagtttattaacttccagtcaccttgatttttgctaaaatgaagactctgcagtctacacttctcctgttactgcttgtgcctctgataaagccagcaccaccaacccagcaggactcacgcattatctatgattatggaacagataattttgaagaatccatatttagccaagattatgaggataaatacctggatggaaaaaatattaaggaaaaagaaactgtgataatacccaatgagaaaagtcttcaattacaaaaagatgaggcaataacaccattacctcccaagaaagaaaatgatgaaatgcccacgtgtctgctgtgtgtttgtttaagtggctctgtatactgtgaagaagttgacattgatgctgtaccacccttaccaaaggaatcagcctatctttacgcacgattcaacaaaattaaaaagctgactgccaaagattttgcagacatacctaacttaagaagactcgattttacgggaaatttgatagaagatatagaagatggtactttttcaaaactttctctgttagaagaactttcacttgctgaaaatcaactactaaaacttccagttcttcctcccaagctcactttatttaatgcaaaatacaacaaaatcaagagtaggggaatcaaagcaaatgcattcaaaaaactgaataacctcaccttcctctacttggaccataatgccctggaatccgtgcctcttaatttaccagaaagtctacgtgtaattcatcttcagttcaacaacatagcttcaattacagatgacacattctgcaaggctaatgacaccagttacatccgggaccgcattgaagagatacgcctggagggcaatccaatcgtcctgggaaagcatccaaacagttttatttgcttaaaaagattaccgatagggtcatacttttaacctctattggtacaacatataaatgaaagtacacctacactaatagtctgtctcaacaatgtgtaaaggaacttaagtattggtttaatattaaccttgtatctcattttgaaggaatttaatattttaagcaaggatgttcaaaatcttacatataataagtaaaaagtaagactgaatgtctacgttcgaaacaaagtaatatgaaaatatttaaacagcattacaaaatcctagtttatactagactaccatttaaaaatcatgtttttatataaatgcccaaatttgagatgcattattcctattactaatgatgtaagtacgaggataaatccaagaaactttcaactctttgcctttcctggcctttactggatcccaaaagcatttaaggtacatgttccaaaaactttgaaaagctaaatgtttcccatgatcgctcattcttcttttatgattcatacgttattccttataaagtaagaactttgttttcctcctatcaaggcagctattttattaaatttttcacttagtctgagaaatagcagatagtctcatatttaggaaaactttccaaataaaataaatgttattctctgataaagagctaatacagaaatgttcaagttattttactttctggtaatgtcttcagtaaaatattttctttatctaaatattaacattctaagtctaccaaaaaaagttttaaactcaagcaggccaaaaccaatatgcttataagaaataatgaaaagttcatccatttctgataaagttctctatggcaaagtctttcaaatacgagataactgcaaaatattttccttttatactacagaaatgagaatctcatcaataaattagttcaagcataagatgaaaacagaatattctgtggtgccagtgcacactaccttcccacccatacacatccatgttcactgtaacaaactgaatattcacaataaagcttctgagtaacactttctgattactcatgataaactgacatggctaactgcaagaattaaatcttctatctgagagtaataatttatgatgactcagtggtgccagagtaaagtttctaaaataacattcctctcacttgtaccccactaaaagtattagtctacacattacattgaagttaaacacaaaattatcagtgttttagaaacatgagtccggactgtgtaagtaaaagtacaaacattatttccaccataaagtatgtattgaaatcaagttgtctctgtgtacagaatacatacttattcccatttttaagcatttgcttctgttttccctacctagaatgtcagatgtttttcagttatctccccatttgtcaaagttgacctcaagataacatttttcattaaagcatctgagatctaagaacacaattattattctaacaatgattattagctcattcacttattttgataactaatgatcacagctattatactactttctcgttattttgtgtgcatgcctcatttccctgacttaaacctcactgagagcgcaaaatgcagctttatactttttactttcaattgcctagcacaatagtgagtacatttgaattgaatatataataaatattgcaaaataaaatccaaaaaaaaaaaaaaaaa

SEQ ID NO: 160 - DNA, 1899 bp, Homo sapiens
agcgcgcgactttttgaaagccaggagggttcgaattgcaacggcagctgccgggcgtatgtgttggtgctagaggcagctgcagggtctcgctgggggccgctcgggaccaattttgaagaggtacttggccacgacttattttcacctccgacctttccttccaggcggtgagactctggactgagagtggctttcacaatggaagggatcagtaatttcaagacaccaagcaaattatcagaaaaaaagaaatctgtattatgttcaactccaactataaatatcccggcctctccgtttatgcagaagcttggctttggtactggggtaaatgtgtacctaatgaaaagatctccaagaggtttgtctcattctccttgggctgtaaaaaagattaatcctatatgtaatgatcattatcgaagtgtgtatcaaaagagactaatggatgaagctaagattttgaaaagccttcatcatccaaacattgttggttatcgtgcttttactgaagccaatgatggcagtctgtgtcttgctatggaatatggaggtgaaaagtctctaaatgacttaatagaagaacgatataaagccagccaagatccttttccagcagccataattttaaaagttgctttgaatatggcaagagggttaaagtatctgcaccaagaaaagaaactgcttcatggagacataaagtcttcaaatgttgtaattaaaggcgattttgaaacaattaaaatctgtgatgtaggagtctctctaccactggatgaaaatatgactgtgactgaccctgaggcttgttacattggcacagagccatggaaacccaaagaagctgtggaggagaatggtgttattactgacaaggcagacatatttgcctttggccttactttgtgggaaatgatgactttatcgattccacacattaatctttcaaatgatgatgatgatgaagataaaacttttgatgaaagtgattttgatgatgaagcatactatgcagcgttgggaactaggccacctattaatatggaagaactggatgaatcataccagaaagtaattgaactcttctctgtatgcactaatgaagaccctaaagatcgtccttctgctgcacacattgttgaagctctggaaacagatgtctagtgatcatctcagctgaagtgtggcttgcgtaaataactgtttattccaaaatatttacatagttactatcagtagttattagactctaaaattggcatatttgaggaccatagtttcttgttaacatatggataactatttctaatatgaaatatgcttatattggctataagcacttggaattgtactgggttttctgtaaagttttagaaactagctacataagtactttgatactgctcatgctgacttaaaacactagcagtaaaacgctgtaaactgtaacattaaattgaatgaccattacttttattaatgatctttcttaaatattctatattttaatggatctactgacattagcactttgtacagtacaaaataaagtctacatttgtttaaaacactgaaccttttgctgatgtgtttatcaaatgataactggaagctgaggagaatatgcctcaaaaagagtagctccttggatacttcagactctggttacagattgtcttgatctcttggatctcctcagatctttggtttttgctttaatttattaaatgtattttccatactgagtttaaaatttattaatttgtaccttaagcatttcccagctgtgtaaaaacaataaaactcaaataggatgataaagaataaaggacactttgggtaccagaaaaaaaaaaaaaaaaaaaaaaaaaaaaaaaaaaaaaaaaaaaaaaa

SEQ ID NO: 161 - DNA, 3213 bp, Homo sapiens
gaccgaagcaagagctggttcaggtggcagccacagcagcctcagggacctcagcaactatggcctcctgcccagactctgataatagctgggtgcttgctggctccgagagcctgccagtggagacactgggcccggcatccaggatggacccagaatctgagagagccctgcaggcccctcacagcccctccaagacagatgggaaagaattagctgggaccatggatggagaagggacgctcttccagactgaaagccctcagtctggcagcattctaacagaggagactgaggtcaagggcaccctggaaggtgatgtttgtggtgtggagcctcctggcccaggagacacagtagtccagggagacctgcaggagaccaccgtggtgacaggcctgggaccagacacacaggacctggaaggccagagccctccacagagcctgccttcaacccccaaagcagcttggatcagggaggagggccgctgctccagcagtgacgatgacaccgacgtggacatggagggtctgcggagacggcggggccgggaggccggcccacctcagcccatggtgcccctggctgtggagaaccaggctgggggtgagggtgcaggcggggagctgggcatctccctcaacatgtgcctccttggggccctggttctgcttggcctgggggtcctcctcttctcaggtggcctctcagagtctgagactgggcccatggaggaagtggagcggcaggtcctcccagaccccgaggtgctggaagctgtgggggacaggcaggatgggctaagggaacagctgcaggccccagtgcctcctgacagtgtccccagcctgcaaaacatgggtcttctgctggacaagctggccaaggagaaccaggacatccggctgctgcaggcccagctgcaggcccaaaaggaagagcttcagagcctgatgcaccagcccaaagggctagaggaggagaatgcccagctccggggggctctgcagcagggcgaagccttccagcgggctctggagtcagagctgcagcagctgcgggcccggctccaggggctggaggccgactgtgtccggggcccagatggggtgtgcctcagtgggggtagaggcccacagggtgacaaggccatcagggagcaaggccccagggagcaggagccagaactcagcttcctgaagcagaaggaacagctggaggctgaggcacaggcattaaggcaagagttagagaggcagcgacggctgctggggtctgtacagcaggatctggagaggagcttgcaggatgccagccgcggggacccagctcatgctggcttggctgagctgggccacagattggcccagaaactgcagggcctggagaactggggccaggaccctggggtctctgccaatgcctcaaaggcctggcaccagaagtcccacttccagaattctagggagtggagtggaaaggaaaagtggtgggatgggcagagagaccggaaggctgagcactggaaacataagaaggaagaatctggccgggaaaggaagaagaactggggaggtcaggaggacagggagccagcaggaaggtggaaggagggcaggccaagggtggaggagtcggggagcaagaaggagggcaagcgacagggcccgaaggaacccccaaggaaaagtggtagcttccactcctctggagaaaagcagaagcaacctcggtggagggaagggactaaggacagccatgaccccctgccatcctgggcagagctgttgaggcccaagtaccgggcaccccagggctgctcaggtgtggacgagtgtgcccggcaggagggcctgactttctttggcacagagctagccccagtgcggcaacaggagctggcctctctgctaagaacatacttggcacggctgccctgggctgggcagctgaccaaggagctacccctctcacctgctttctttggtgaggatggcatcttccgtcatgaccgcctccgcttccgggattttgtggatgccctggaggacagcttggaggaggtggctgtgcaacagacaggtgatgatgatgaagtagatgactttgaggacttcatcttcagccacttctttggagacaaagcactgaagaagaggtcagggaagaaggacaagcactcacagagcccaagagctgcggggcccagggaggggcacagccatagccaccaccaccaccaccggggctgacaccctgccccacagggaatggccttggcctggcccagcccaagatcccagcgttatctaactcctggagggtggactctgtcctggcttgtttggtgtcctcagatatctttcacacagtagagcaaaatcaccagccctgcactgatgtcactttatgtagaaaaaggccttagctggacctgcgttgccgtctatgcaaatgcatgcaaatactccaggccctgggatgtgggcttgtgttttgtcactgtgaagggggagatgggagaggagcctgttttggggtggggtctggggaaggcaatctgattctgaagctaaagagctttcatcctcttgagtgtatgtccccatagtgggccccttgacccacatgctgaccggtgccttgggatttgactagagttgctggctcgaggcccagcacgaggacttaccctggggttttgttaggtttggaagcagctgtccctagggggtgaagtcccccccctttttttttttacccctgcttctcccacggcttcacctccctatgtgaactgtagactcagatcccaataaagtgctgttgcagctatgatgctaggtggtttctaagcacaggggacaccccacaccccctgcctgaatggatgggtccatcccaggcactggtacttgcccccttgttctgtatccccctttgcccttgccttgcccttccaacaaaccctaggcccttgagaagctgatacttctccttttgctcacagctgccttggccccacccctgggagatgtagcaaattgagtgtgggttttggagtctgagcctcaggctcaaatccaggccaagtgatcttgggcaagttaatctctgggaactttgggtttcttatcctcaaaaaaggcgatggaagggctggggaagtgattaaataaaagcaacgcaagaaaaaaaaaaaaaaaaaaa

SEQ ID NO: 162 - DNA, 1479 bp, Homo sapiens
gcgaggcgcggggaaggcgcacctggggtggccctggcgtgcgggcggcgacatggaggacggcgtgctcaaggagggcttcctggtcaagaggggccacattgtccacaactggaaggcgcgatggttcatccttcggcagaacacgctggtgtactacaagcttgaggggggtcggagagtgacccctcccaagggccggatcctcctggatggctgcaccatcacctgcccctgcctggagtatgaaaaccgaccgctcctcattaagctgaagactcaaacatccacggagtacttcctggaggcctgttctcgagaggagcgggatgcctgggcctttgagatcaccggggctattcatgcagggcagccggggaaggtccagcagctgcacagcctgagaaactccttcaagctgcccccgcacatcagcctgcatcgcattgtggacaagatgcacgatagcaacaccggaatccgttcaagccccaacatggagcagggaagcacctataaaaagaccttcctcggctcctccctggtggactggctcatctccaacagcttcacggccagccgtctggaggcggtgaccctggcctccatgctcatggaggagaacttcctcaggcctgtgggtgtccgaagcatgggagccattcgctctggggatctggccgagcagttcctggatgactccacagccctgtacacttttgctgagagctacaaaaagaagataagccccaaggaagaaattagcctgagcactgtggagttaagtggcacggtggtgaaacaaggctacctggccaagcagggacacaagaggaaaaactggaaggtgcgtcgctttgttctaaggaaggatccagctttcctgcattactatgacccttccaaagaagagaacaggccagtgggtgggttttctcttcgtggttcactcgtgtctgctctggaagataatggcgttcccactggggttaaagggaatgtccagggaaacctcttcaaagtgattactaaggatgacacacactattacattcaggccagcagcaaggctgagcgagccgagtggattgaagctatcaaaaagctaacatgacaaggacctgagggaaccaggattcctccctcctaccagatgacacagacaagagttcctggagaatgggagtgttaagacttttgacttctttgtaagttttgtactgctttggagagtgaatgctgccaagagttcctcagattacaaacagcagtggtgccatttccttccccatcttcatgttacaaacctggaaaggctagaacagccattaggcgtcagcatcttgacttttccccagcatcacaaacagccatttcctcgggcaccaaagtaggttccctttgttggaacaattacactggccatgccataatgttgaataaaactctcttcttatgagaaaaaaaaaaaaaaaaaaa

SEQ ID NO: 163 - DNA, 2204 bp, Homo sapiens
gagcggtgcggaggctctgctcggatcgaggtctgcagcgcagcttcgggagcatgagtgctgcagtgactgcagggaagctggcacgggcaccggccgaccctgggaaagccggggtccccggagttgcagctcccggagctccggcggcggctccaccggcgaaagagatcccggaggtcctagtggacccacgcagccggcggcgctatgtgcggggccgctttttgggcaagggcggctttgccaagtgcttcgagatctcggacgcggacaccaaggaggtgttcgcgggcaagattgtgcctaagtctctgctgctcaagccgcaccagagggagaagatgtccatggaaatatccattcaccgcagcctcgcccaccagcacgtcgtaggattccacggctttttcgaggacaacgacttcgtgttcgtggtgttggagctctgccgccggaggtctctcctggagctgcacaagaggaggaaagccctgactgagcctgaggcccgatactacctacggcaaattgtgcttggctgccagtacctgcaccgaaaccgagttattcatcgagacctcaagctgggcaaccttttcctgaatgaagatctggaggtgaaaataggggattttggactggcaaccaaagtcgaatatgacggggagaggaagaagaccctgtgtgggactcctaattacatagctcccgaggtgctgagcaagaaagggcacagtttcgaggtggatgtgtggtccattgggtgtatcatgtataccttgttagtgggcaaaccaccttttgagacttcttgcctaaaagagacctacctccggatcaagaagaatgaatacagtattcccaagcacatcaaccccgtggccgcctccctcatccagaagatgcttcagacagatcccactgcccgcccaaccattaacgagctgcttaatgacgagttctttacttctggctatatccctgcccgtctccccatcacctgcctgaccattccaccaaggttttcgattgctcccagcagcctggaccccagcaaccggaagcccctcacagtcctcaataaaggcttggagaaccccctgcctgagcgtccccgggaaaaagaagaaccagtggttcgagagacaggtgaggtggtcgactgccacctcagtgacatgctgcagcagctgcacagtgtcaatgcctccaagccctcggagcgtgggctggtcaggcaagaggaggctgaggatcctgcctgcatccccatcttctgggtcagcaagtgggtggactattcggacaagtacggccttgggtatcagctctgtgataacagcgtgggggtgctcttcaatgactcaacacgcctcatcctctacaatgatggtgacagcctgcagtacatagagcgtgacggcactgagtcctacctcaccgtgagttcccatcccaactccttgatgaagaagatcaccctccttaaatatttccgcaattacatgagcgagcacttgctgaaggcaggtgccaacatcacgccgcgcgaaggtgatgagctcgcccggctgccctacctacggacctggttccgcacccgcagcgccatcatcctgcacctcagcaacggcagcgtgcagatcaacttcttccaggatcacaccaagctcatcttgtgcccactgatggcagccgtgacctacatcgacgagaagcgggacttccgcacataccgcctgagtctcctggaggagtacggctgctgcaaggagctggccagccggctccgctacgcccgcactatggtggacaagctgctgagctcacgctcggccagcaaccgtctcaaggcctcctaatagctgccctcccctccggactggtgccctcctcactcccacctgcatctggggcccatactggttggctcccgcggtgccatgtctgcagtgtgccccccagccccggtggctgggcagagctgcatcatccttgcaggtgggggttgctgtgtaagttatttttgtacatgttcgggtgtgggttctacagccttgtccccctccccctcaaccccaccatatgaattgtacagaatatttctattgaattcggaactgtcctttccttggctttatgcacattaaacagatgtgaatattcaaaaaaaaaaaaaaaaaaaaaaaaaaaaaaaaaaa

SEQ ID NO: 164 - DNA, 3331 bp, Homo sapiens
cagagggcaccgcccaggcctcggaaggtgtcagggagaactttccgtggtttcagcgtcgtcgcctggagcggcggtttagagagccgagcctgatgggcgccaaggccggctggctgcttggagcgctgcctcgaagggactgcgtaaggaagctaatccggagaacccaggccagagcctgaaatatggcgacctgcatcggggagaagatcgaggattttaaagttggaaatctgcttggtaaaggatcatttgctggtgtctacagagctgagtccattcacagtggtttggaagttgcaatcaaaatgatagataagaaagccatgtacaaagcaggaatggtacagagagtccaaaatgaggtgaaaatacattgccaattgaaacatccttctatcttggagctttataactattttgaagatagcaattatgtgtatctggtattagaaatgtgccataatggagaaatgaacaggtatctaaagaatagagtgaaacccttctcagaaaatgaagctcgacacttcatgcaccagatcatcacagggatgttgtatcttcattctcatggtatactacaccgggacctcacactttctaacctcctactgactcgtaatatgaacatcaagattgctgattttgggctggcaactcaactgaaaatgccacatgaaaagcactatacattatgtggaactcctaactacatttcaccagaaattgccactcgaagtgcacatggccttgaatctgatgtttggtccctgggctgtatgttttatacattacttatcgggagaccacccttcgacactgacacagtcaagaacacattaaataaagtagtattggcagattatgaaatgccaacttttttgtcaatagaggccaaggaccttattcaccagttacttcgtagaaatccagcagatcgtttaagtctgtcttcagtattggaccatccttttatgtcccgaaattcttcaacaaaaagtaaagatttaggaactgtggaagactcaattgatagtgggcatgccacaatttctactgcaattacagcttcttccagtaccagtataagtggtagtttatttgacaaaagaagacttttgattggtcagccactcccaaataaaatgactgtatttccaaagaataaaagttcaactgatttttcttcttcaggagatggaaacagtttttatactcagtggggaaatcaagaaaccagtaatagtggaaggggaagagtaattcaagatgcagaagaaaggccacattctcgataccttcgtagagcttattcctctgatagatctggcacttctaatagacagtctcaagcaaaaacatatacaatggaacgatgtcactcagcagaaatgctttcagtgtccaaaagatcaggaggaggtgaaaatgaagagaggtactcacccacagacaacaatgccaacatttttaacttctttaaagaaaagacatccagtagttctggatcttttgaaagacctgataacaatcaagcactctccaatcatctttgtccaggaaaaactccttttccatttgcagacccgacacctcagactgaaaccgtacaacagtggtttgggaatctgcaaataaatgctcatttaagaaaaactactgaatatgacagcatcagcccaaaccgggacttccagggccatccagatttgcagaaggacacatcaaaaaatgcctggactgatacaaaagtcaaaaagaactctgatgcttctgataatgcacattctgtaaaacagcaaaataccatgaaatatatgactgcacttcacagtaaacctgagataatccaacaagaatgtgtttttggctcagatcctctttctgaacagagcaagactaggggtatggagccaccatggggttatcagaatcgtacattaagaagcattacatctccgttggttgctcacaggttaaaaccaatcagacagaaaaccaaaaaggctgtggtgagcatacttgattcagaggaggtgtgtgtggagcttgtaaaggagtatgcatctcaagaatatgtgaaagaagttcttcagatatctagtgatggaaatacgatcactatttattatccaaatggtggtagaggttttcctcttgctgatagaccaccctcacctactgacaacatcagtaggtacagctttgacaatttaccagaaaaatactggcgaaaatatcaatatgcttccaggtttgtacagcttctaagatctaaatctcccaaaatcacttattttacaagatatgctaaatgcattttgatggagaattctcctggtgctgattttgaggtttggttttatgatggggtaaaaatacacaaaacagaagatttcattcaggtgattgaaaagacagggaagtcttacactttaaaaagtgaaagtgaagttaatagcttgaaagaggagataaaaatgtatatggaccatgctaatgagggtcatcgtatttgtttagcactggaatccataatttcagaagaggaaaggaaaactaggagtgctccctttttcccaataatcataggaagaaaacctggtagtactagttcacctaaggccttatcacctcctccttctgtggattcaaattacccaacgagagatagagcatctttcaacagaatggtcatgcatagtgatgcttctccaacacaggcaccaatccttaatccctctatggttacaaatgaaggacttggtcttacaactacagcttctggaacagacatctcttctaatagtctaaaagattgtcttcctaaatcagcacaacttttgaaatctgtttttgtgaaaaatgttggttgggctacacagttaactagtggagctgtgtgggttcagtttaatgatgggtcccagttggttgtgcaggcaggagtgtcttctatcagttatacctcaccaaatggtcaaacaactaggtatggagaaaatgaaaaattaccagactacatcaaacagaaattacagtgtctgtcttccatccttttgatgttttctaatccgactcctaattttcattgattaaaactcctttcagacatataagtttaataaataacttttttgttgactttcaagtaaagtgattttttttaatttaacataaagtcttcagaaagcctttctatgaaagaattttaacctataatgtaaaccatgtatctgagataacaaagcagaatgaaacttgagtcacttactaaatatagtggatataaaatagaacacctgactttgctcttagaccataa

SEQ ID NO: 165 - DNA, 3443 bp, Homo sapiens
agtcaggggtcacggcggcgtaggctgtggcgggaaacgctgtttgaagcgggatggatggcaagcggcggccaggcccagggcccggggtgcccccaaagcgggcccgtgggggcctctgggatgatgatgatgcaccttggccatcccaattcgaggaggacctggcactgatggaggagatggaggcagaacacaggctgcaggagcaggaggaggaggagctgcagtcagtcctggagggggttgcagacgggcaggtcccaccatcagccatagatcctcgctggcttcggcccacaccaccagcgctggacccccagacagagcccctcatcttccaacagttggagattgaccattatgtgggcccagcgcagcctgtgcctggggggcccccaccatcccgcggctccgtgcctgtgctccgcgccttcggggtcaccgatgaggggttctctgtctgctgccacatccacggcttcgctccctacttctacaccccagcgccccctggtttcgggcccgagcacatgggtgacctgcaacgggagctgaacttggccatcagccgggacagtcgcggggggagggagctgactgggccggccgtgctggctgtggaactgtgctcccgagagagcatgtttgggtaccacgggcacggcccctccccgttcctgcgcatcaccgtggcgctgccgcgcctcgtggccccggcccgccgtctcctggaacagggcatccgtgtggcaggcctgggcacgcccagcttcgcgccctacgaggccaacgtcgactttgagatccggttcatggtggacacggacatcgtcggctgcaactggctggagctcccagctgggaaatacgccctgaggctgaaggagaaggctacgcagtgccagctggaggcggacgtgctgtggtctgacgtggtcagtcacccaccggaagggccatggcagcgcattgcgcccttgcgcgtgctcagcttcgatatcgagtgcgccggccgcaaaggcatcttccctgagcctgagcgggaccctgtcatccagatctgctcgctgggcctgcgctggggggagccggagcccttcctacgcctggcgctcaccctgcggccctgtgcccccatcctgggtgccaaggtgcagagctacgagaaggaggaggacctgctgcaggcctggtccaccttcatccgtatcatggaccccgacgtgatcaccggttacaacatccagaacttcgaccttccgtacctcatctctcgggcccagaccctcaaggtacaaacattccctttcctgggccgtgtggccggcctttgctccaacatccgggactcttcattccagtccaagcagacgggccggcgggacaccaaggttgtcagcatggtgggccgcgtgcagatggacatgctgcaggtgctgctgcgggagtacaagctccgctcccacacgctcaatgccgtgagcttccacttcctgggcgagcagaaggaggacgtgcagcacagcatcatcaccgacctgcagaatgggaacgaccagacccgccgccgcctggctgtgtactgcctgaaggatgcctacctgccactgcggctgctggagcggctcatggtgctggtgaacgccgtggagatggcgagggtcactggcgtgcccctcagctacctgctcagtcgtggccagcaggtcaaagtcgtatcccagctgttgcggcaggccatgcacgaggggctgctgatgcccgtggtgaagtcagagggcggcgaggactacacgggagccactgtcatcgagcccctcaaagggtactacgacgtccccatcgccaccctggacttctcctcgctgtacccgtccatcatgatggcccacaacctgtgttacaccacgctccttcggcccgggactgcacagaaactgggcctgactgaggatcagttcatcaggacccccaccggggacgagtttgtgaagacctcagtgcggaaggggctgctgccccagatcctggagaacctgctcagtgcccggaagagggccaaggccgagctggccaaggagacagaccccctccggcgccaggtcctggatggacggcagctggcgctgaaggtgagcgccaactccgtatacggcttcactggcgcccaggtgggcaagttgccgtgcctggagatctcacagagcgtcacggggttcggacgtcagatgatcgagaaaaccaagcagctggtggagtctaagtacacagtggagaatggctacagcaccagtgccaaggtggtgtatggtgacactgactccgtcatgtgccgattcggcgtgtcctcggtggctgaggcgatggccctggggcgggaggccgcggactgggtgtcaggtcacttcccgtcgcccatccggctggagtttgagaaggtctacttcccatacctgcttatcagcaagaagcgctacgcgggcctgctcttctcctcccggcccgacgcccacgaccgcatggactgcaagggcctggaggccgtgcgcagggacaactgccccctcgtggccaacctggtcactgcctcactgcgccgcctgctcatcgaccgagaccctgagggcgcggtggctcacgcacaggacgtcatctcggacctgctgtgcaaccgcatcgatatctcccagctggtcatcaccaaggagctgacccgcgcggcctccgactatgccggcaagcaggcccacgtggagctggccgagaggatgaggaagcgggaccccgggagtgcgcccagcctgggcgaccgcgtcccctacgtgatcatcagtgccgccaagggtgtggccgcctacatgaagtcggaggacccgctgttcgtgctggagcacagcctgcccattgacacgcagtactacctggagcagcagctggccaagcccctcctgcgcatcttcgagcccatcctgggcgagggccgtgccgaggctgtgctactgcggggggaccacacgcgctgcaagacggtgctcacgggcaaggtgggcggcctcctggccttcgccaaacgccgcaactgctgcattggctgccgcacagtgctcagccaccagggagccgtgtgtgagttctgccagccccgggagtctgagctgtatcagaaggaggtatcccatctgaatgccctggaggagcgcttctcgcgcctctggacgcagtgccagcgctgccagggcagcctgcacgaggacgtcatctgcaccagccgggactgccccatcttctacatgcgcaagaaggtgcggaaggacctggaagaccaggagcagctcctgcggcgcttcggaccccctggacctgaggcctggtgaccttgcaagcatcccatggggcgggggcgggaccagggagaattaataaagttctggacttttgct

SEQ ID NO: 166 - DNA, 7859 bp, Homo sapiens
cgccaaatttctcccctgaagcagaggtggtagccaacggctccatgtctctgaggagcggcgggcggcggcgcgcggacccaggcgcggatggcgaggccagcagggatgatggcgccacttcctcagtttcggcactcaagcgcctggaacggagtcagtggacggataagatggatttgcggtttggttttgagcggctgaaggagcctggtgagaagacaggctggctcattaacatgcatcctaccgagattttagatgaagataagcgcttaggcagtgcagtggattactactttattcaagatgacggaagcagatttaaggtggctttgccctataaaccgtatttctacattgcgaccagaaagggttgtgagcgagaagtttcatcttttctctccaagaagtttcagggcaaaattgcaaaagtggagactgtccccaaagaggatctggacttgccaaatcacttggtgggtttgaagcgaaattacatcaggctgtccttccacactgtggaggatcttgtcaaagtgaggaaggagatctcccctgccgtgaagaagaacagggagcaggatcacgccagcgacgcgtacacagctctgctttccagtgttctgcagaggggcggtgtcattactgatgaagaggaaacctctaagaagatagctgaccagttggacaacattgtggacatgcgcgagtacgatgttccctaccacatccgcctctccattgacctgaagatccacgtggctcattggtacaatgtcagataccgaggaaatgcttttccggtagaaatcacccgccgagatgaccttgttgaacgacctgaccctgtggttttggcatttgacattgagacgaccaaactgcccctcaagtttcctgatgctgagacagaccagattatgatgatttcctacatgatcgatggccagggctacctcatcaccaacagggagattgtttcagaagatattgaagattttgagttcacccccaagccagaatatgaaggccccttttgtgtcttcaatgaacccgatgaggctcatctgatccaaaggtggtttgaacacgtccaggagaccaaacccaccatcatggtcacctacaacggggacttttttgactggccatttgtggaggcccgggcagcagtccacggtctgagcatgcagcaggagataggcttccagaaggacagccagggggagtacaaggcgccccagtgcatccacatggactgcctcaggtgggtgaagagggacagttaccttcctgtgggcagtcataatctcaaggcggccgccaaggccaagctaggctatgatcccgtggagctagacccggaggacatgtgccggatggccacggagcagccccagactctggccacgtattctgtgtcagatgctgtcgccacttactacctgtacatgaagtacgtccacccattcatctttgctctgtgcaccattattcccatggagcccgacgaggtgctgcggaagggctctggcactctgtgtgaggccttgctgatggtgcaggccttccacgccaacatcatcttccccaacaagcaagagcaggagttcaataagctgacggacgacggacacgtgctggactctgagacctacgtcgggggccacgtggaggccctcgagtctggggttttccgcagcgatatcccttgccggtttaggatgaatcctgccgcctttgacttcctgctgcagcgggttgagaagaccttgcgccacgcccttgaggaagaggagaaagtgcctgtggagcaagtcaccaactttgaagaggtgtgtgatgagattaagagcaagcttgcctccctgaaggacgttcccagccgcatcgagtgtccactcatctaccacctggacgtgggggccatgtaccccaacatcatcctgaccaaccgcctgcagccctctgccatggtggacgaagccacctgtgctgcctgtgacttcaataagcctggagcaaactgccagcggaagatggcctggcagtggaggggcgagttcatgccagccagtcgcagcgaataccatcggatccagcaccagctggagtcagagaagttcccccccttgttcccagaggggccagctcgggcctttcatgaactgtcccgcgaggaacaggcgaaatacgagaagagaaggctggcggattactgccggaaagcctacaagaagatccacatcaccaaggtggaagagcgtctcaccaccatctgccagcgggaaaactccttctacgtggacaccgtgcgtgccttccgggacaggcgttacgagttcaaagggctccacaaggtgtggaaaaagaagctctcggcggccgtggaggtgggcgacgcggctgaggtgaagcgctgcaagaacatggaggtgctgtatgactcgctgcagctggcccacaagtgcatcctgaactccttctatggctatgtcatgcgcaagggggctcgctggtactccatggagatggctggcatcgtctgcttcacaggggccaacatcatcacccaggcacgggagctgatcgagcagattgggaggcccttagagctggacacagatggtatatggtgcgtcctgcccaacagcttcccagaaaattttgtcttcaagacgaccaatgtgaagaagcccaaagtgaccatctcctacccaggcgccatgttgaacatcatggtcaaggaaggcttcaccaatgaccagtaccaggagctggctgagccgtcctcactcacctacgtcacccgctcagagaacagcatcttttttgaggttgatgggccctaccttgccatgattcttccagcctccaaggaagaaggcaagaaattgaagaagaggtatgctgtgttcaatgaagacggttctctggctgagctcaagggctttgaggtcaaacgccgcggggaactgcagctgattaagatcttccaatcctcggtgtttgaggccttcctcaagggcagcacgctggaagaggtgtatggctctgtagccaaggtggctgactactggctggacgtgctgtacagcaaggcagccaacatgcctgactctgagctattcgagctcatctctgagaaccgttccatgtctcggaagctggaagattacggggagcagaagtctacgtccatcagcacagcaaagcgcctggccgagttcctgggagaccagatggtcaaggatgcagggctgagttgccgctacatcatctcccgcaagcccgagggctcccctgtcacggagagggccatcccacttgccattttccaagcagagcccacggtgaggaagcactttctccggaaatggctcaagagctcttcccttcaagactttgatattcgagcaattctggattgggactactacattgagcggctgggaagcgccatccagaagatcatcaccatccctgcggccctgcagcaggtaaagaacccagtgccacgtgtcaaacaccccgactggctgcacaaaaaactgctggagaagaatgatgtctacaagcagaagaagatcagtgagctcttcaccctggagggcaggagacaggtcacgatggccgaggcctcagaagacagtccgaggccaagtgctcctgacatggaggacttcggcctcgtaaagctgcctcacccagcagcccctgtcactgtgaagaggaagcgagttctttgggagagccaggaggagtcccaggacctcacgccgactgtgccctggcaggaaatcttggggcagcctcccgccctgggaaccagccaggaggaatggcttgtctggctccggttccacaagaagaagtggcagctgcaggcccggcagcgcctcgcccgcaggaagaggcagcgtctggagtcggcagagggtgtgctcaggcccggggccatccgggatggtcctgccacggggctggggagcttcttgcgaagaactgcccgcagcatcctggaccttccgtggcagattgtgcagatcagcgagaccagccaggccggcctgttcaggctgtgggcgctcgttggcagtgacttgcactgcatcaggctgagcatcccccgtgtgttctacgtgaaccagcgagtcgctaaagcggaggagggtgcttcgtatcgcaaggtaaatcgggtccttcctcgctccaacatggtctacaatctctatgagtattcagtgccagaggacatgtaccaggaacacatcaacgagatcaacgctgagctgtcagcgccagacatcgagggcgtatatgagactcaggttccgttactgttccgggccctggtgcacctgggctgtgtgtgtgtggtcaataaacagctggtgaggcacctttcaggctgggaagcagagacctttgctcttgagcacctggagatgcgctctctggcccagttcagctacctggaaccagggagtatccgccatatctacctgtaccaccacgcacaggcccacaaagcgctcttcgggatcttcatcccctcacagcgcagggcatccgtctttgtgctggacactgtgcgcagcaaccagatgcccagccttggcgccctgtactcagcagagcacggcctcctcctggagaaggtgggccctgagctcctgccaccccccaaacacaccttcgaagttcgggcagaaactgacctgaagaccatctgcagagccatccagcgattcctgctcgcctacaaggaggagcgccgggggcccacactcatcgctgttcagtccagctgggagctgaagaggctggccagtgaaattcctgtcttggaggaattcccactggtgcctatctgtgtggctgacaagatcaactatggggtcctggactggcagcgccatggagcccggcgcatgatccgtcactacctcaacctggacacctgcctgtcgcaggccttcgagatgagcaggtactttcacattcccattgggaacctaccagaggacatctccacattcggctccgacctcttctttgcccgccacctccagcgccacaaccacctgctctggctgtcccctacagcccgccctgacctgggtggaaaggaggctgatgacaactgtcttgtcatggagttcgatgaccaagccactgttgagatcaacagttcaggctgttactccacagtgtgtgtggagctggaccttcagaacctggccgtcaacaccattctccagtctcaccatgtcaacgacatggagggggccgacagcatggggatcagcttcgacgtgatccagcaggcctccctggaggacatgatcacgggtggtcaggctgccagtgccccggccagctacgatgagacagccctgtgctctaacaccttcaggatcctgaagagcatggtcgtgggctgggtgaaggagatcacccagtaccacaacatctatgcagacaaccaggtgatgcacttctaccgctggcttcggtcgccatcctctctgcttcatgaccctgccctgcaccgcacactccacaacatgatgaagaagctcttcctgcagctcatcgctgagttcaagcgcctggggtcatcagtcatctacgccaacttcaaccgcatcatcctctgtacaaagaagcgccgtgtggaagatgccatcgcttacgtggagtacatcaccagcagcatccattcaaaggagaccttccattctctgacaatttctttctctcgatgctgggaatttcttctctggatggatccatctaactatggcggaatcaaaggaaaagtttcatctcgtattcactgtggactgcaagactcccagaaagcagggggagcagaggatgagcaggaaaatgaggacgatgaggaggaaagagatggggaggaggaggaagaggcggaggaatccaacgtggaggatttactggaaaacaactggaacattttgcagtttttgccacaggcagcctcctgccagaactacttcctcatgattgtttcagcgtacatcgtggccgtgtaccactgcatgaaggacgggctgaggcgcagtgctccagggagcacccccgtgaggaggaggggggccagccagctctcccaggaggccgagggggcggtcggagcccttcccggaatgatcaccttctctcaggattatgtcgcaaatgagctcactcagagcttcttcaccatcactcagaagattcagaagaaagtcacaggctctcggaactccactgagctctcagagatgtttcctgtcctccccggttcccacttgctgctcaataaccctgccctggagttcatcaaatacgtgtgcaaggtgctgtccctggacaccaacatcacaaaccaggtgaataagctgaaccgagacctgcttcgcctggtggatgtcggcgagttctccgaggaggcccagttccgagacccctgccgctcctacgtgcttcctgaggtcatctgccgcagctgtaacttctgccgcgacctggacctgtgtaaagactcttccttctcagaggatggggcggtcctgcctcagtggctctgctccaactgtcaggcgccctacgactcctctgccatcgagatgacgctggtggaagttctacagaagaagctgatggccttcaccctgcaggacctggtctgcctgaagtgccgcggggtgaaggagaccagcatgcctgtgtactgcagctgcgcgggagacttcgccctcaccatccacacccaggtcttcatggaacagatcggaatattccggaacattgcccagcactacggcatgtcgtacctcctggagaccctggagtggctgctgcagaagaacccacagctgggccattagccagccccgggccccgggtgcctctgcgtccgtgccaggcctcctgatgccaaggccacatccccgtgcttccagtgaccagaccactgaccaccctgactgtccaaacctgtgaccccaggccagggaacggggaggaaaccaaagaaaaccattttcagggagctcagacgtcacaggagggagcgggagcaggatgtggccctggcctcgccagagcacctgaagaagcaggccgtgagcgaggctgcgagtgccctgggcgccgtttctcacgcagtgaatgcttttccaggcctctgttgcttcctgcaccacacctggtggggtgggagcgtcctctaggtgcccctagttctttgtcctgcctcccagagggaggaaaagcccctgggggcttctggctccctgagattgggctctgagacgagacgggttcccaaggccctggtggggctggagtctcacctgtttgcatggagaaatgggctggccccacagcctcacaggagcagtttgtgggctggtttccccaggaatccagaccctaacccgtgagaatctggattttggcttgtgagccctgcttatttggagccgggtctagagggaaccctctatcagcctcaggaaaacaagacctctgtgcacctcacttttggctcactgcagcccttgtccttcacctccacacaggaccagctggaagcagaaagaagaaaggccaatttcacagggcaccaaacaagtatgaaatgtaaatcagaaatgcagacaccccagacgagagcctcacaggagggagggggccccacaggctccccaggaggctcgtgtctttggcccagagccagccttagtttgtccctgccatctactgtctgaggccatcgctgctacactttgtttttatttgtatttcatactgaagtttcaaaaaaaaaaaaaaaaaaa

SEQ ID NO: 167 - DNA, 1690 bp, Homo sapiens
gccaaatcgcaaatatggcgccggagcggctgcggagccgggcgctctccgccttcaagttgcggggcttgctgctccgtggtgaagctattaagtacctcacagaagctcttcagtctatcagtgaattagagcttgaagataaactggaaaagataattaatgcagttgagaagcaacccttgtcatcaaacatgattgaacgatctgtggtggaagcagcagtccaggaatgcagtcagtctgttgatgaaactatagagcacgttttcaatatcataggagcatttgatattccacgctttgtgtacaattcagaaagaaaaaaatttcttcctctgttaatgaccaaccaccctgcaccaaatttatttggaacaccaagagataaagcagagatgtttcgtgagcgatataccattttgcaccagaggacccacaggcatgaattatttactcctccggtgataggttctcaccctgatgaaagcggaagcaaattccagcttaaaacaatagaaaccttattgggtagtacaaccaaaatcggagatgcgattgttcttggaatgataacgcagttaaaagagggaaaattttttctggaagatcctactggaacagtccaactagaccttagtaaagctcagttccatagtggtttatacacagaggcatgctttgtcttagcagaaggttggtttgaagatcaagtgtttcatgtcaatgcctttggatttccacccactgagccctctagtactactagggcatactatggaaatattaatttttttggaggtccttctaatacatctgtgaagacttctgcaaaactaaaacagctagaagaggagaataaagatgctatgtttgtgtttttatctgatgtttggttggaccaggtggaagtattggaaaaacttcgcataatgtttgctggttattcaccagcacctccaacctgctttattctgtgtggtaatttttcatctgcaccatatggaaaaaatcaagttcaagctttgaaagattccctaaaaactttggcagatataatatgtgaatacccagatattcaccaaagtagtcgttttgtgtttgtacctggtccagaggatcctggatttggttccatcttaccaaggccaccacttgctgaaagcatcactaatgaattcagacaaagggtaccattttcagtttttactactaatccttgcagaattcagtactgtacacaggaaattactgtcttccgtgaagacttagtaaataaaatgtgcagaaactgcgtccgttttcctagcagcaatttggctattcctaatcactttgtaaagactatcttatcccaaggacatctgactcccctacctctttatgtctgcccagtgtattgggcatatgactatgctttgagagtgtatcctgtgcccgatctacttgtcattgcagacaaatatgatcctttcactacgacaaataccgaatgcctctgcataaaccctggctcttttccaagaagtggattttcattcaaagttttttatccttctaataagacagtagaagatagcaaacttcaaggcttttgagattcttaaagatcatctgaagaaaattcatcagttttctgcttaactctatatcttatgtgattctgatattacaataaaattatggtaaa

SEQ ID NO: 168 - DNA, 3213 bp, Homo sapiens
agagactcaagatgattccctttttacccatgttttctctactattgctgcttattgttaaccctataaacgccaacaatcattatgacaagatcttggctcatagtcgtatcaggggtcgggaccaaggcccaaatgtctgtgcccttcaacagattttgggcaccaaaaagaaatacttcagcacttgtaagaactggtataaaaagtccatctgtggacagaaaacgactgttttatatgaatgttgccctggttatatgagaatggaaggaatgaaaggctgcccagcagttttgcccattgaccatgtttatggcactctgggcatcgtgggagccaccacaacgcagcgctattctgacgcctcaaaactgagggaggagatcgagggaaagggatccttcacttactttgcaccgagtaatgaggcttgggacaacttggattctgatatccgtagaggtttggagagcaacgtgaatgttgaattactgaatgctttacatagtcacatgattaataagagaatgttgaccaaggacttaaaaaatggcatgattattccttcaatgtataacaatttggggcttttcattaaccattatcctaatggggttgtcactgttaattgtgctcgaatcatccatgggaaccagattgcaacaaatggtgttgtccatgtcattgaccgtgtgcttacacaaattggtacctcaattcaagacttcattgaagcagaagatgacctttcatcttttagagcagctgccatcacatcggacatattggaggcccttggaagagacggtcacttcacactctttgctcccaccaatgaggcttttgagaaacttccacgaggtgtcctagaaaggttcatgggagacaaagtggcttccgaagctcttatgaagtaccacatcttaaatactctccagtgttctgagtctattatgggaggagcagtctttgagacgctggaaggaaatacaattgagataggatgtgacggtgacagtataacagtaaatggaatcaaaatggtgaacaaaaaggatattgtgacaaataatggtgtgatccatttgattgatcaggtcctaattcctgattctgccaaacaagttattgagctggctggaaaacagcaaaccaccttcacggatcttgtggcccaattaggcttggcatctgctctgaggccagatggagaatacactttgctggcacctgtgaataatgcattttctgatgatactctcagcatggttcagcgcctccttaaattaattctgcagaatcacatattgaaagtaaaagttggccttaatgagctttacaacgggcaaatactggaaaccatcggaggcaaacagctcagagtcttcgtatatcgtacagctgtctgcattgaaaattcatgcatggagaaagggagtaagcaagggagaaacggtgcgattcacatattccgcgagatcatcaagccagcagagaaatccctccatgaaaagttaaaacaagataagcgctttagcaccttcctcagcctacttgaagctgcagacttgaaagagctcctgacacaacctggagactggacattatttgtgccaaccaatgatgcttttaagggaatgactagtgaagaaaaagaaattctgatacgggacaaaaatgctcttcaaaacatcattctttatcacctgacaccaggagttttcattggaaaaggatttgaacctggtgttactaacattttaaagaccacacaaggaagcaaaatctttctgaaagaagtaaatgatacacttctggtgaatgaattgaaatcaaaagaatctgacatcatgacaacaaatggtgtaattcatgttgtagataaactcctctatccagcagacacacctgttggaaatgatcaactgctggaaatacttaataaattaatcaaatacatccaaattaagtttgttcgtggtagcaccttcaaagaaatccccgtgactgtctatacaactaaaattataaccaaagttgtggaaccaaaaattaaagtgattgaaggcagtcttcagcctattatcaaaactgaaggacccacactaacaaaagtcaaaattgaaggtgaacctgaattcagactgattaaagaaggtgaaacaataactgaagtgatccatggagagccaattattaaaaaatacaccaaaatcattgatggagtgcctgtggaaataactgaaaaagagacacgagaagaacgaatcattacaggtcctgaaataaaatacactaggatttctactggaggtggagaaacagaagaaactctgaagaaattgttacaagaagaggtcaccaaggtcaccaaattcattgaaggtggtgatggtcatttatttgaagatgaagaaattaaaagactgcttcagggagacacacccgtgaggaagttgcaagccaacaaaaaagttcaaggttctagaagacgattaagggaaggtcgttctcagtgaaaatccaaaaaccagaaaaaaatgtttatacaaccctaagtcaataacctgaccttagaaaattgtgagagccaagttgacttcaggaactgaaacatcagcacaaagaagcaatcatcaaataattctgaacacaaatttaatatttttttttctgaatgagaaacatgagggaaattgtggagttagcctcctgtggtaaaggaattgaagaaaatataacaccttacaccctttttcatcttgacattaaaagttctggctaactttggaatccattagagaaaaatccttgtcaccagattcattacaattcaaatcgaagagttgtgaactgttatcccattgaaaagaccgagccttgtatgtatgttatggatacataaaatgcacgcaagccattatctctccatgggaagctaagttataaaaataggtgcttggtgtacaaaactttttatatcaaaaggctttgcacatttctatatgagtgggtttactggtaaattatgttattttttacaactaattttgtactctcagaatgtttgtcatatgcttcttgcaatgcatattttttaatctcaaacgtttcaataaaaccatttttcagatataaagagaattacttcaaattgagtaattcagaaaaactcaagatttaagttaaaaagtggtttggacttgggaa

SEQ ID NO: 169 - DNA, 3091 bp, Homo sapiens
gcttcgccccgtggcgcggtttgaaattttgcggggctcaacggctcgcggagcggctacgcggagtgacatcgccggtgtttgcgggtggttgttgctctcggggccgtgtggagtaggtctggacctggactcacggctgcttggagcgtccgccatgaggagaagtgaggtgctggcggaggagtccatagtatgtctgcagaaagccctaaatcaccttcgggaaatatgggagctaattgggattccagaggaccagcggttacaaagaactgaggtggtaaagaagcatatcaaggaactcctggatatgatgattgctgaagaggaaagcctgaaggaaagactcatcaaaagcatatccgtctgtcagaaagagctgaacactctgtgcagcgagttacatgttgagccatttcaggaagaaggagagacgaccatcttgcaactagaaaaagatttgcgcacccaagtggaattgatgcgaaaacagaaaaaggagagaaaacaggaactgaagctacttcaagagcaagatcaagaactgtgcgaaattctttgtatgccccactatgatattgacagtgcctcagtgcccagcttagaagagctgaaccagttcaggcaacatgtgacaactttgagggaaacaaaggcttctaggcgtgaggagtttgtcagtataaagagacagatcatactgtgtatggaagaattagaccacaccccagacacaagctttgaaagagatgtggtgtgtgaagacgaagatgccttttgtttgtctttggagaatattgcaacactacaaaagttgctacggcagctggaaatgcagaaatcacaaaatgaagcagtgtgtgaggggctgcgtactcaaatccgagagctctgggacaggttgcaaatacctgaagaagaaagagaagctgtggccaccattatgtctgggtcaaaggccaaggtccggaaagcgctgcaattagaagtggatcggttggaagaactgaaaatgcaaaacatgaagaaagtgattgaggcaattcgagtggagctggttcagtactgggaccagtgcttttatagccaggagcagagacaagcttttgcccctttctgtgctgaggactacacagaaagtctgctccagctccacgatgctgagattgtgcggttaaaaaactactatgaagttcacaaggaactctttgaaggtgtccagaagtgggaagaaacctggaggcttttcttagagtttgagagaaaagcttcagatccaaatcgatttacaaaccgaggaggaaatcttctaaaagaagaaaaacaacgagccaagctccagaaaatgctgcccaagctggaagaagagttgaaggcacgaattgaattgtgggaacaggaacattcaaaggcatttatggtgaatgggcagaaattcatggagtatgtggcagaacaatgggagatgcatcgattggagaaagagagagccaagcaggaaagacaactgaagaacaaaaaacagacagagacagagatgctgtatggcagcgctcctcgaacacctagcaagcggcgaggactggctcccaatacaccgggcaaagcacgtaagctgaacactaccaccatgtccaatgctacggccaatagtagcattcggcctatctttggagggacagtctaccactcccccgtgtctcgacttcctccttctggcagcaagccagtcgctgcttccacctgttcagggaagaaaacaccccgtactggcaggcatggagccaacaaggagaacctggagctcaacggcagcatcctgagtggtgggtaccctggctcggcccccctccagcgcaacttcagcattaattctgttgccagcacctattctgagtttgcgcgagaactttcaaaggcttccaaatctgatgctacttctggaatcctcaattcaaccaacatccagtcctgagaagccctgatcagtcaaccagctgtggcttcctgtgcctagactggacctaattatatgggggtgactttagtttttcttcagcttaggcgtgcttgaaaccttggccaggttccatgaccatgggcctaacttaaagatgtgaatgagtgttacagttgaaagcccatcataggtttagtggtcctaggagacttggttttgacttatatacatgaaaagtttatggcaagaagtgcaaattttagcatatggggcctgacttctctaccacataattctacttgctgaagcatgatcaaagcttgttttatttcaccactgtaggaaaatgattgactatgcccatccctgggggtaattttggcatgtatacctgtaactagtaattaacatcttttttgtttaggcatgttcaattaatgctgtagctatcatagctttgctcttacctgaagccttgtccccaccacacaggacagccttcctcctgaagagaatgtctttgtgtgtccgaagttgagatggcctgccctactgccaaagaggtgacaggaaggctgggagcagctttgttaaattgtgttcagttctgttacacagtgcattgccctttgttgggggtatgcatgtatgaacacacatgcttgtcggaacgctttctcggcgtttgtcccttggctctcatctcccccattcctgtgcctactttgcctgagttcttctacccccgcagttgccagccacattgggagtctgtttgttccaatgggttgagctgtctttgtcgtggagatctggaactttgcacatgtcactactggggaggtgttcctgctctagcttccacgatgaggcgccctctttacctatcctctcaatcactactcttcttgaagcactattatttattcttccgctgtctgcctgcagcagtactactgtcaacatagtgtaaatggttctcaaaagcttaccagtgtggacttggtgttagccacgctgtttactcatacagtacgtgtcctgtttttaaaatatacaattattcttaaaaataaattaaaatctgtatacttacatttcaaaaagaaaaaaaaaaaaaaaaaaaaa

SEQ ID NO: 170 - DNA, 1471 bp, Homo sapiens
ccgccggccgtgctgttcccgccaattcctgtggtaatccttaccgtggcgagttccgcgctcaatggagacgtttgaccccaccgagctgcccgagctgcttaaactttattaccggaggctctttccctactctcagtactatcgctggctcaactacggtggagtgataaagaattactttcaacaccgtgaattttcattcacattgaaagatgatatttacattcgctaccaatccttcaacaaccagagtgatctggaaaaggagatgcagaaaatgaatccatacaagattgatataggcgcagtatattctcacagacccaatcaacacaatacagtgaagctgggagctttccaggctcaggaaaaagaactggtatttgacattgacatgacagactatgacgatgtgaggagatgttgtagttctgcagacatatgtcctaagtgctggaccctcatgacaatggccatacgcatcattgacagagcattgaaggaggactttggatttaagcatcgtctctgggtatattctggaaggagaggtgttcattgttgggtctgtgatgaatcagttagaaaactgtcttctgcagtacgttctgggatagttgagtatttgagccttgtaaagggtggtcaagacgttaaaaagaaagttcacctaagtgaaaaaattcacccttttatcagaaaatctataaacataataaaaaaatactttgaagaatatgccttggttaatcaagatattctcgaaaataaagaaagctgggataagattttagcccttgttcctgaaacaattcatgatgaacttcaacaaagcttccaaaagtctcacaattcacttcagcgttgggagcacttgaagaaagtagccagcagatatcagaataacatcaaaaatgacaaatatggaccctggctggagtgggagattatgctccagtactgttttccacggctggatatcaatgtcagcaaaggaatcaatcatctactgaagagcccttttagtgttcatcctaaaacaggtcgcatatctgtgcctattgatttgcagaaagtggaccagtttgatccatttactgttccgaccataagcttcatctgccgtgaattggatgccatttccactaatgaagaggaaaaagaggagaatgaagctgaatctgatgtcaaacatagaaccagagattataagaagaccagtctagcaccttatgtgaaagtttttgaacattttcttgaaaatctggataaatcccgaaaaggagaacttcttaagaagagtgatttacaaaaagatttctgaagacagagctcctcaaaccattgtggatatcttctgccttcaaccacagatcaaatacttcaagagccatttaataaatatggcagaactatatatgtgtcttaaacctcaaagtaaattttccttgagaaataaaaaaaaaaa

SEQ ID NO: 171 - DNA, 3328 bp, Homo sapiens
ggtccctgagcaaaatgggaaatggttcagtgaaacctaaacattctaagcacccagatggacactctgggaacctcaccactgatgctctgcggaacaaggtgacagagctggagagagagttgaggaggaaggatgctgagatccaggagcgggagtaccatttgaaggagctgcgggagcagctgtcgaagcagactgtggccattgctgaactcacagaggagctccagaacaagtgcatccagctgaacaagctgcaggatgtggtgcatatgcagggaggaagcccgcttcaggcctctccagataaagtgcctcttgaggtccaccggaagacctctggattggtctctctccatagcaggaggggagcaaaggctggcgtgtctgctgagccaacaacccggacctatgacctgaacaaaccccctgaattttcctttgagaaagcaagagtcagaaaagactccagtgagaagaagctcattacagatgcccttaataaaaatcagtttctgaaaagactggatcctcagcagatcaaagacatggtggaatgcatgtatgggagaaactatcagcaagggagttacattattaagcaaggagaaccaggaaaccatatctttgtgctggcagagggtcgactagaggtgttccaaggggagaaattgctgtcctccatccctatgtggaccacatttggggagcttgccattttatacaattgtacaaggactgcctctgtgaaagctattaccaatgttaaaacatgggcactagatcgagaggtattccagaatataatgaggaggacagcccaagctagagatgaacaatacagaaacttcctcagaagtgtatccttgctgaagaatttacctgaagataaattaaccaagatcattgactgcttggaagtggaatactatgacaaaggagattacatcattagagagggcgaggaaggaagtacctttttcattttggcaaaaggaaaggtaaaagtaacacagagcacagaaggccatgatcaaccacagctgataaaaacactgcagaaaggagaatactttggagaaaaagctcttatcagtgatgatgtcaggtcagctaacattattgctgaagaaaatgatgttgcatgcctggttatagatcgagaaacattcaaccaaactgtcggtacatttgaagagctgcaaaaataccttgaaggatatgtggcaaacctgaaccgtgatgatgaaaaaagacatgcgaagcggtccatgtctaactggaagctgtccaaagcactctctctggaaatgattcagctgaaggagaaggtggccagattttcctcatcatccccattccagaaccttgagattattgcaacactgggcgttggtgggttcggaagagttgagcttgttaaagtaaaaaatgagaatgttgcttttgctatgaagtgtataaggaagaagcacatagttgacaccaagcagcaggagcatgtctactcagagaagaggatcctagaggagctgtgctctccattcattgtgaaattatatcgtactttcaaggacaataagtatgtatacatgcttctggaggcctgcttaggtggggagctctggagtatattaagggacagaggcagctttgatgaacccacctccaaattctgcgttgcttgtgtgacagaagcatttgattacctgcatcgactaggtattatctacagagacttgaaaccagaaaacttaattctagatgctgagggttaccttaaattggttgactttggatttgcgaagaaaatagggtctggacagaaaacatggacattctgtgggactccagaatatgtagctcctgaagtcattctcaacaagggacatgacttcagtgtggatttctggtcactgggaattctagtgtatgagctcctaacgggcaacccacccttttctggggttgaccaaatgatgacctacaatttgattctcaaaggaattgaaaaaatggattttcccaggaagataacacgacgacctgaggatttgattcggaggctttgcaggcaaaatccaacagaaaggctgggaaatctgaagaatggaataaatgacattaagaaacacaggtggttaaatggttttaattgggagggactgaaagcacggagccttccatcacctttgcaaagagagctcaagggacccatagatcacagctactttgacaaatatcctcctgaaaagggaatgcctccagatgagctatcaggctgggataaagacttctgacagaagaaaagttgattactgcctgtactctacagaagaggacctcaaggatcaataatccaacacattattttcttttcagagtattataatatctttggaagaccattagggaaaagaaattcctgcacaatgggaagaggagaatggtgtggatatggttctgagttatagtgtcttatttagatgctgtgaattattgatgtattacattatttgcttttctcaactgctagaggctaccccattttcctttccacaatcagagccatttttgttaaagtggcagttttttctgcaatctattgttccattccaatcatatccttctcgtttgagtactactaacgtttaaaaagggtcttgcccttgaataactaagtcatacaaatagaaggaaaaacaatggtgaattttggagagctccccagctctcagcaacttcatataagcatggtggtatcttaaaatggtggtttgcagaaaccatggtagccaacagaacctcctgactttcacctgcttttaacctgaaaatatattaatacgcctctgacatgagtccagggagaggcaagattgagcaatagtcagtggcaccatttcctaaagtaactgaatcaatcaatccagtcaggtaattattttctattggggaacttagaaaaaaaagtaaagcaagaaatattttctctcctttatgatcagtgataccttagagacttttcgaaagtccttgttaaagatagttacaatgtgtggttaaatgatgctaaaatattttcacaaccagagtagaaaacgtgctggaacaaaattgcgaaggcttttgcctcccagtaaatagaaaggaaaatatattctagtaggtaagactgctgactctttgaaaatctgaggtattttgaaaaattctgtgatagttgctattaataaaccaaaattgtatagaatcatcgttaatttttaatataaatcccattgacaaatgttgatgcactgtagtcactgctgagttaatagcg

SEQ ID NO: 172 - DNA, 2221 bp, Homo sapiens
ggccaggaacgccagccgttcacgcgttcggtcctccttggctgactcaccgccctggccgccgcaccatggacgcccccaggcaggtggtcaactttgggcctggtcccgccaagctgccgcactcagtgttgttagagatacaaaaggaattattagactacaaaggagttggcattagtgttcttgaaatgagtcacaggtcatcagattttgccaagattattaacaatacagagaatcttgtgcgggaattgctagctgttccagacaactataaggtgatttttctgcaaggaggtgggtgcggccagttcagtgctgtccccttaaacctcattggcttgaaagcaggaaggtgtgctgactatgtggtgacaggagcttggtcagctaaggccgcagaagaagccaagaagtttgggactataaatatcgttcaccctaaacttgggagttatacaaaaattccagatccaagcacctggaacctcaacccagatgcctcctacgtgtattattgcgcaaatgagacggtgcatggtgtggagtttgactttatacccgatgtcaagggagcagtactggtttgtgacatgtcctcaaacttcctgtccaagccagtggatgtttccaagtttggtgtgatttttgctggtgcccagaagaatgttggctctgctggggtcaccgtggtgattgtccgtgatgacctgctggggtttgccctccgagagtgcccctcggtcctggaatacaaggtgcaggctggaaacagctccttgtacaacacgcctccatgtttcagcatctacgtcatgggcttggttctggagtggattaaaaacaatggaggtgccgcggccatggagaagcttagctccatcaaatctcaaacaatttatgagattattgataattctcaaggattctacgtttgtccagtggagccccaaaatagaagcaagatgaatattccattccgcattggcaatgccaaaggagatgatgctttagaaaaaagatttcttgataaagctcttgaactcaatatgttgtccttgaaagggcataggtctgtgggaggcatccgggcctctctgtataatgctgtcacaattgaagacgttcagaagctggccgccttcatgaaaaaatttttggagatgcatcagctatgaacacatcctaaccaggatatactctgttcttgaacaacatacaaagtttaaagtaacttggggatggctacaaaaagttaacacagtatttttctcaaatgaacatgtttattgcagattcttcttttttgaaagaacaacagcaaaacatccacaactctgtaaagctggtgggacctaatgtcaccttaattctgacttgaactggaagcattttaagaaatcttgttgcttttctaacaaattcccgcgtattttgcctttgctgctactttttctagttagatttcaaacttgcctgtggacttaataatgcaagttgcgattaattatttctggagtcatgggaacacacagcacagagggtaggggggccctctaggtgctgaatctacacatctgtggggtctcctgggttcagcggctgttgattcaaggtcaacattgaccattggaggagtggtttaagagtgccaggcgaagggcaaactgtagatcgatctttatgctgttattacaggagaagtgacatactttatatatgtttatattagcaaggtctgtttttaataccatatactttatatttctatacatttatatttctaataatacagttatcactgatatatgtagacacttttagaatttattaaatccttgaccttgtgcattatagcattccattagcaagagttgtaccccctccccagtcttcgccttcctctttttaagctgttttatgaaaaagacctagaagttcttgattcatttttaccattctttccataggtagaagagaaagttgattggttggttgtttttcaattatgccattaaactaaacatttctgttaaattaccctatcctttgttctctactgttttctttgtaatgtatgactacgagagtgatactttgctgaaaagtctttcccctattgtttatctattgtcagtattttatgttgaatatgtaaagaacattaaagtcctaaaacatctaaaaaaaaaaaaaaaaaaaaaaaaaaaaaaaaaaa

SEQ ID NO: 173 - DNA, 728 bp, Homo sapiens
gcggcctcagatgaatgcggctgttaagacctgcaataatccagaatggctactctgatctatgttgataaggaaaatggagaaccaggcacccgtgtggttgctaaggatgggctgaagctggggtctggaccttcaatcaaagccttagatgggagatctcaagtttcaacaccacgttttggcaaaacgttcgatgccccaccagccttacctaaagctactagaaaggctttgggaactgtcaacagagctacagaaaagtctgtaaagaccaagggacccctcaaacaaaaacagccaagcttttctgccaaaaagatgactgagaagactgttaaagcaaaaagctctgttcctgcctcagatgatgcctatccagaaatagaaaaattctttcccttcaatcctctagactttgagagttttgacctgcctgaagagcaccagattgcgcacctccccttgagtggagtgcctctcatgatccttgacgaggagagagagcttgaaaagctgtttcagctgggccccccttcacctgtgaagatgccctctccaccatgggaatccaatctgttgcagtctccttcaagcattctgtcgaccctggatgttgaattgccacctgtttgctgtgacatagatatttaaatttcttagtgcttcagagtttgtgtgtatttgtattaataaagcattcttcaacagaaaaaaaaaaaaaaaaa

SEQ ID NO: 174 - DNA, 3216 bp, Homo sapiens
gcgaagtgaagggtggcccaggtggggccaggctgactgaatgtatctcctagctatggactaaataatacatggggggaaataaacaagtattcatgagggtgaaaatgtgacccagcaggaaaattacaactattttcaattgacgttgaataggatgagtcatggaatttaagtgatttactgaagattatactactggtagatagaagagctaaagaaagatggatactatgatgctgaatgtgcggaatctgtttgagcagcttgtgcgccgggtggagattctcagtgaaggaaatgaagtccaatttatccagttggcgaaggactttgaggatttccgtaaaaagtggcagaggactgaccatgagctggggaaatacaaggatcttttgatgaaagcagagactgagcgaagtgctctggatgttaagctgaagcatgcacgtaatcaggtggatgtagagatcaaacggagacagagagctgaggctgactgcgaaaagctggaacgacagattcagctgattcgagagatgctcatgtgtgacacatctggcagcattcaactaagcgaggagcaaaaatcagctctggcttttctcaacagaggccaaccatccagcagcaatgctgggaacaaaagactatcaaccattgatgaatctggttccattttatcagatatcagctttgacaagactgatgaatcactggattgggactcttctttggtgaagactttcaaactgaagaagagagaaaagaggcgctctactagccgacagtttgttgatggtccccctggacctgtaaagaaaactcgttccattggctctgcagtagaccaggggaatgaatccatagttgcaaaaactacagtgactgttcccaatgatggcgggcccatcgaagctgtgtccactattgagactgtgccatattggaccaggagccgaaggaaaacaggtactttacaaccttggaacagtgactccaccctgaacagcaggcagctggagccaagaactgagacagacagtgtgggcacgccacagagtaatggagggatgcgcctgcatgactttgtttctaagacggttattaaacctgaatcctgtgttccatgtggaaagcggataaaatttggcaaattatctctgaagtgtcgagactgtcgtgtggtctctcatccagaatgtcgggaccgctgtccccttccctgcattcctaccctgataggaacacctgtcaagattggagagggaatgctggcagactttgtgtcccagacttctccaatgatcccctccattgttgtgcattgtgtaaatgagattgagcaaagaggtctgactgagacaggcctgtataggatctctggctgtgaccgcacagtaaaagagctgaaagagaaattcctcagagtgaaaactgtacccctcctcagcaaagtggatgatatccatgctatctgtagccttctaaaagactttcttcgaaacctcaaagaacctcttctgacctttcgccttaacagagcctttatggaagcagcagaaatcacagatgaagacaacagcatagctgccatgtaccaagctgttggtgaactgccccaggccaacagggacacattagctttcctcatgattcacttgcagagagtggctcagagtccacatactaaaatggatgttgccaatctggctaaagtctttggccctacaatagtggcccatgctgtgcccaatccagacccagtgacaatgttacaggacatcaagcgtcaacccaaggtggttgagcgcctgctttccttgcctctggagtattggagtcagttcatgatggtggagcaagagaacattgaccccctacatgtcattgaaaactcaaatgccttttcaacaccacagacaccagatattaaagtgagtttactgggacctgtgaccactcctgaacatcagcttctcaagactccttcatctagttccctgtcacagagagtccgttccaccctcaccaagaacactcctagatttgggagcaaaagcaagtctgccactaacctaggacgacaaggcaacttttttgcttctccaatgctcaagtgaagtcacatctgcctgttacttcccagcattgactgactataagaaaggacacatctgtactctgctctgcagcctcctgtactcattactacttttagcattctccaggcttttactcaagtttaattgtgcatgagggttttattaaaactatatatatctccccttccttctcctcaagtcacataatatcagcactttgtgctggtcattgttgggagcttttagatgagacatctttccaggggtagaagggttagtatggaattggttgtgattctttttggggaagggggttattgttcctttggcttaaagccaaatgctgctcatagaatgatctttctctagtttcatttagaactgatttccgtgagacaatgacagaaaccctacctatctgataagattagcttgtctcagggtgggaagtgggagggcagggcaaagaaaggattagaccagaggatttaggatgcctccttctaagaaccagaagttctcattccccattatgaactgagctataatatggagctttcataaaaatgggatgcattgaggacagaactagtgatgggagtatgcgtagctttgatttggatgattaggtctttaatagtgttgagtggcacaaccttgtaaatgtgaaagtacaactcgtatttatctctgatgtgccgctggctgaactttgggttcatttggggtcaaagccagtttttcttttaaaattgaattcattctgatgcttggcccccatacccccaaccttgtccagtggagcccaacttctaaaggtcaatatatcatcctttggcatcccaactaacaataaagagtaggctataagggaagattgtcaatattttgtggtaagaaaagctacagtcattttttctttgcactttggatgctgaaatttttcccatggaacatagccacatctagatagatgtgagctttttcttctgttaaaattattcttaatgtctgtaaaaacgattttcttctgtagaatgtttgacttcgtattgacccttatctgtaaaacacctatttgggataatatttggaaaaaaagtaaatagct

SEQ ID NO: 175 - DNA, 2267 bp, Homo sapiens
agggtttggcgggaattctgaaagccgctggcggaccgcgcgcagcggccagagaccgagccctaaggagagtgcggcgcttcccgaggcgtgcagctgggaactgcaactcatctgggttgtgcgcagaaggctggggcaagcgagtagagaagtggagcgtaagccaggggcgttgggggccgtgcgggtcgggcgcgtgccacgcccgcggggtgaagtcggagcgcggggcctgctggagagaggagcgctgcggaccgagtaatggcaatgcagatgcagcttgaagcaaatgcagatacttcagtggaagaagaaagctttggcccacaacccatttcacggttagagcagtgtggcataaatgccaacgatgtgaagaaattggaagaagctggattccatactgtggaggctgttgcctatgcgccaaagaaggagctaataaatattaagggaattagtgaagccaaagctgataaaattctggctgaggcagctaaattagttccaatgggtttcaccactgcaactgaattccaccaaaggcggtcagagatcatacagattactactggctccaaagagcttgacaaactacttcaaggtggaattgagactggatctatcacagaaatgtttggagaattccgaactgggaagacccagatctgtcatacgctagctgtcacctgccagcttcccattgaccggggtggaggtgaaggaaaggccatgtacattgacactgagggtacctttaggccagaacggctgctggcagtggctgagaggtatggtctctctggcagtgatgtcctggataatgtagcatatgctcgagcgttcaacacagaccaccagacccagctcctttatcaagcatcagccatgatggtagaatctaggtatgcactgcttattgtagacagtgccaccgccctttacagaacagactactcgggtcgaggtgagctttcagccaggcagatgcacttggccaggtttctgcggatgcttctgcgactcgctgatgagtttggtgtagcagtggtaatcactaatcaggtggtagctcaagtggatggagcagcgatgtttgctgctgatcccaaaaaacctattggaggaaatatcatcgcccatgcatcaacaaccagattgtatctgaggaaaggaagaggggaaaccagaatctgcaaaatctacgactctccctgtcttcctgaagctgaagctatgttcgccattaatgcagatggagtgggagatgccaaagactgaatcattgggtttttcctctgttaaaaaccttaagtgctgcagcctaatgagagtgcactgctccctggggttctctacaggcctcttcctgttgtgactgccaggataaagcttccgggaaaacagctattatatcagcttttctgatggtataaacaggagacaggtcagtagtcacaaactgatctaaaatgtttattccttctgtagtgtattaatctctgtgtgttttctttggttttggaggaggggtatgaagtatctttgacatggtgccttaggaatgacttgggtttaacaagctgtctactggacaatcttatgtttccaagagaactaaagctggagagacctgacccttctctcacttctaaattaatggtaaaataaaatgcctcagctatgtagcaaagggaatgggtctgcacagattctttttttctgtcagtaaaactctcaagcaggtttttaagttgtctgtctgaatgatcttgtgtaaggttttggttatggagtcttgtgccaaacctactaggccattagcccttcaccatctacctgcttggtctttcattgctaagactaactcaagataatcctagagtcttaaagcatttcaggccagtgtggtgtcttgcgcctgtactcccagcactttgggaggccgaggcaggtggatcgcttgagcccaggagttttaagtccagcttggccaaggtggtgaaatcccatctctacaaaaaatgcagaacttaatctggacacactgttacacgtgcctgtagtcccagctactcgatagcctgaggtgggagaatcacttaagcctggaaggtggaagttgcagtgagtcgagattgcactgctgcattccagccagggtgacagagtgagaccatgtttcaaacaagaaacatttcagagggtaagtaaacagatttgattgtgaggcttctaataaagtagttattagtagtgaa

SEQ ID NO: 176 - DNA, 2143 bp, Homo sapiens
gaagccaacaagaatttgagaactgtaaataccaagccttgaaagggaccatggtgcggcctgtgagacataagaaaccagtcaattactcacagtttgaccactctgacagtgatgatgattttgtttctgcaactgtacctttaaacaagaaatccagaacagcaccaaaggagttaaaacaagataaaccaaaacctaacttgaacaatctccggaaagaagaaatcccagtacaagagaaaacccctaaaaaaaggatggctttagatgacaagctctaccagagagacttagaagttgcactagctttatcagtgaaggaacttccaacagtcaccactaatgtgcagaactctcaagataaaagcattgaaaaacatggcagtagtaaaatagaaacaatgaataagtctcctcatatctctaattgcagtgtagccagtgattatttagatttggataagattactgtggaagatgatgttggtggtgttcaagggaaaagaaaagcagcatctaaagctgcagcacagcagaggaagattcttctggaaggcagtgatggtgatagtgctaatgacactgaaccagactttgcacctggtgaagattctgaggatgattctgatttttgtgagagtgaggataatgacgaagacttctctatgagaaaaagtaaagttaaagaaattaaaaagaaagaagtgaaggtaaaatccccagtagaaaagaaagagaagaaatctaaatccaaatgtaatgctttggtgacttcggtggactctgctccagctgccgtcaaatcagaatctcagtccttgccaaaaaaggtttctctgtcttcagataccactaggaaaccattagaaatacgcagtccttcagctgaaagcaagaaacctaaatgggtcccaccagcggcatctggaggtagcagaagtagcagcagcccactggtggtagtgtctgtgaagtctcccaatcagagtctccgccttggcttgtccagattagcacgagttaaacctttgcatccaaatgccactagcacctgagtgtggtacaggaggaatgtttggttgggagaatcacagctttacaagggtgtttatatttgatttgtgtttatatttgaggcaggtattgtaatataaaggaatccattaccatgtcctataaatgacctctagccattttatgattatgttctctgtaaaactcttcaagacttcaatgagaagtttgtttataagaattatcttctcatacctttccttgtgaagagcgtattctgtttttctatcagttcgacatgaagtccacatcacatgctgttcttttctagttacatgatgtgcctttctagctttgtctagtttatagcaccttaactttaactgttcagttttatctggcagaggaaacattcttatttctttcagaagacatttctgaaatcttataagctacttaagctacgttgtcagttttatcgcaaagatgttttgtattttagccaaatctttttatagtacaaacttagaattattttacacactaaaatggttgcagttttatggcatatgtctccgatttagatggttgttctctagaaaatagtatttaaagacattttatgaaatcttcattgtcaaaacctttaataaaagtggaaatattttgaaatgccctttttcttgataccactcatccacgtgttcctgattgtccacatttcatgataaaatgagagctctgcagagaatgttagcctttctgttgtaaatgtaatcttcaagtagtcactttttgttaagttctttagaaagtagttgtcaagtacttagtcatccctattatgatatgagatagtacagcttttcaggaagcttagatctgaatttactttgaaaaacaattgtaatgaatattttatatttacattgagaatttcaactagcttctgatcaatttttaataaaaaattttcaaatcatgttagctgttaaaaaatgtataataactcagtttttcttggtttatggaaatatctatattaatgtgaaaataattaatttagaattgtgattaaagtgagcatttgtctatcaaaaaaaaaaaaaaaaaaaaaaaaaaaaaa

SEQ ID NO: 177 - DNA, 4270 bp, Homo sapiens
gcaggtggttgtgggtagcgcgcctgggagggagaaagaagtcgggggccgtggcgcgcagcccgcggggcctgaagggatgttcgaggacaagccccacgctgagggggcggcggtggtcgccgcagccggggaggcgctacaggccctgtgccaggagctgaacctggacgaggggagcgcggccgaagccctggacgactttactgccatccgaggcaactacagcctagagggagaagttacacactggttggcatgttcattatatgttgcatgccgcaaaagcattattcccacggttggaaagggtatcatggaaggcaactgtgtttcacttaccagaatactacgttcagctaaattaagtttaatacaattttttagtaaaatgaagaaatggatggacatgtcaaatctaccacaagaatttcgtgaacgtatagaaaggctagagagaaattttgaggtgtctactgtaatattcaaaaaatatgagccaatttttttagatatatttcaaaatccatatgaagaaccaccaaagttaccacgaagccggaagcagaggaggattccttgcagtgttaaggatctgtttaatttctgttggacactttttgtttatactaagggtaattttcggatgattggggatgacttagtaaactcttatcatttacttctatgctgcttggatctgatttttgccaatgcgattatgtgcccaaatagacaagacttgctaaatccatcatttaaaggtttaccatctgattttcatactgctgactttacggcttctgaagagccaccctgcatcattgctgtactgtgtgaactgcatgatggacttctcgtagaagcaaaaggaataaaggagcactactttaagccatatatttcaaaactctttgacaggaagatattaaaaggagaatgcctcctggacctttcaagttttactgataatagcaaagcagtgaataaggagtatgaagagtatgttctaactgttggtgattttgatgagaggatctttttgggagcagacgcagaagaggaaattggaacacctcgaaagttcactcgtgacaccccattagggaaactgacagcacaggctaatgtggagtataaccttcaacagcactttgaaaaaaaaaggtcatttgcaccttctaccccactgaccggacggagatatttacgagaaaaagaagcagtcattactcctgttgcatcagccacccaaagtgtgagccggttacagagtattgtggctggtctgaaaaatgcaccaagtgaccaacttataaatatttttgaatcttgtgtgcgtaatcctgtggaaaacattatgaaaatactaaaaggaataggagagactttctgtcaacactatactcaatcaacagatgaacagccaggatctcacatagactttgctgtaaacagactaaagctggcagaaattttgtattataaaatactagagactgtaatggttcaggaaacacgaagacttcatggaatggacatgtcagttcttttagagcaagatatatttcatcgttccttgatggcttgttgtttggaaattgtgctctttgcctatagctcacctcgtacttttccttggattattgaagttctcaacttgcaaccattttacttttataaggttattgaggtggtgatccgctcagaagaggggctctcaagggacatggtgaaacacctaaacagcattgaagaacagattttggagagtttagcatggagtcacgattctgcactgtgggaggctctccaggtttctgcaaacaaagttcctacctgtgaagaagttatattcccaaataactttgaaacaggaaatggaggaaatgtgcagggacatcttcccctgatgccaatgtctcctctaatgcacccaagagtcaaggaagttcgaactgacagtgggagtcttcgaagagatatgcaaccattgtctccaatttctgtccatgaacgctacagttctcctaccgcagggagtgctaagagaagactctttggagaggaccccccaaaggaaatgcttatggacaagatcataacagaaggaacaaaattgaaaatcgctccttcttcaagcattactgctgaaaatgtatcaattttacctggtcaaactcttctaacaatggccacagccccagtaacaggaacaacaggacataaagttacaattccattacatggtgtcgcaaatgatgctggagagatcacactgatacctctttccatgaatacaaatcaggagtccaaagtcaagagtcctgtatcacttactgctcattcattaattggtgcttctccaaaacagaccaatctgactaaagcacaagaggtacattcaactggaataaacaggccaaagagaactgggtccttagcactattttacagaaaggtctatcatttggcaagtgtacgcttacgtgatctatgtctaaaactggatgtttcaaatgagttacgaaggaagatatggacgtgttttgaattcactttagttcactgtcctgatctaatgaaagacaggcatttggatcagctcctcctttgtgccttttatatcatggcaaaggtaacaaaagaagaaagaacttttcaagaaattatgaaaagttataggaatcagccccaagctaatagtcacgtatatagaagtgttctgctgaaaagtattccaagagaagttgtggcatataataaaaatataaatgatgactttgaaatgatagattgtgacttagaagatgctacaaaaacacctgactgttccagtggaccagtgaaagaggaaagaggtgatcttataaaattttacaatacaatatatgtaggaagagtgaagtcatttgcactgaaatacgacttggcgaatcaggaccatatgatggatgctccaccactctctccttttccacatattaaacaacagccaggctcaccacgccgcatttcccagcagcactccatttatatttccccgcacaagaatgggtcaggccttacaccaagaagcgctctgctgtacaagttcaatggcagcccttctaagagtttgaaagatatcaacaacatgataaggcaaggtgagcagagaaccaagaagcgagtaatagccatcgatagtgatgcagaatcccctgccaaacgcgtctgtcaagaaaatgatgacgttttactgaaacgactacaggatgttgtcagtgaaagagcaaatcattaatgttgttcttgtttctatgataaaagcactttcagattgttctgcagaaagttggagctctgtccttcaaaccttttagccctatagatgataaatatcactgggttataagaaaaaattgcacaaaaattatgtgctttttaaaatatttatccaaaatgtagttgacagagatgtattttgagttggattggaaaggaatattttaagtgccttttaaaaatactaatagtccggccaggcgctgtggctcacgcctgtaatcccaggactttgggaggccaaggcgggcagatcaccggaggtcaggagttcgagaccagcctgaccaacatggagaaaccccatctctactaaaaatacaaaattagccgggtgtggtggcgcatgcctgtaatcccagctacttgggaggctgaggcagaattgcttgaacccaggaagcggaggttgtggtgagccaaggttgcgccactgcactccagcctgggcaacaagagtaaaactccatctcaaaaaatatatatatatatataaatagggaattttttttaatgtttgctccttgagttttcaagatgaaataaggagaaaccccataactttttagctctcttttaaaaataaatgtctccttctgtgttctgtaatatgaggataaataatctacttttgatagcatgctttgagatatttgtattcttaatttaatattgaaggaaggggttggttcccatagtacctggccagagggttatataccatcctgtctctggcccactgtggtaattccacatccaggtaccaccgccattcagagttgtctcaccccttctcgtgccttttctctccttgagctttataaacagatttgtacctgagccccagtgctacactcatccttgctttccagccctaagccatctcagcctgatgtcacaacccaataaatggggcactttcttcttttgtaaactattatca

SEQ ID NO: 178 - DNA, 2559 bp, Homo sapiens
agattcgcagtggtcgcttcttctccttggatttgttaaggattccaagtaactcttatttggagagaagacgatctgcacttcgcattttggcattgacatttaattttagggtcctttatatagaagggagactacatgaatgtgtaagatcttggaggaagacagcagagagagagagagagagcagagatcccagggttaaaagttggagaaatttcacagtacatcatccaaaagaggagtccatgatggaggcagaggtaaacttggagaggacaggaagatgtcacccaagcgcatagctaaaagaaggtcccccccagcagatgccatccccaaaagcaagaaggtgaaggtctcacacaggtcccacagcacagaacccggcttggtgctgacactaggccagggcgacgtgggccagctggggctgggtgagaatgtgatggagaggaagaagccggccctggtatccattccggaggatgttgtgcaggctgaggctgggggcatgcacaccgtgtgtctaagcaaaagtggccaggtctattccttcggctgcaatgatgagggtgccctgggaagggacacatcagtggagggctcggagatggtccctgggaaagtggagctgcaagagaaggtggtacaggtgtcagcaggagacagtcacacagcagccctcaccgatgatggccgtgtcttcctctggggctccttccgggacaataacggtgtgattggactgttggagcccatgaagaagagcatggtgcctgtgcaggtgcagctggatgtgcctgtggtaaaggtggcctcaggaaacgaccacttggtgatgctgacagctgatggtgacctctacaccttgggctgcggggaacagggccagctaggccgtgtgcctgagttatttgccaaccgtggtggccggcaaggcctcgaacgactcctggtccccaagtgtgtgatgctgaaatccaggggaagccggggccacgtgagattccaggatgccttttgtggtgcctatttcacctttgccatctcccatgagggccacgtgtacggcttcggcctctccaactaccatcagcttggaactccgggcacagaatcttgcttcataccccagaacctaacatccttcaagaattccaccaagtcctgggtgggcttctctggtggccagcaccatacagtctgcatggattcggaaggaaaagcatacagcctgggccgggctgagtatgggcggctgggccttggagagggtgctgaggagaagagcatacccaccctcatctccaggctgcctgctgtctcctcggtggcttgtggggcctctgtggggtatgctgtgaccaaggatggtcgtgttttcgcctggggcatgggcaccaactaccagctgggcacagggcaggatgaggacgcctggagccctgtggagatgatgggcaaacagctggagaaccgtgtggtcttatctgtgtccagcgggggccagcatacagtcttattagtcaaggacaaagaacagagctgatgaagcctctgagggcctggcttctgtcctgcacaacctccctcacagaacagggaagcagtgacagctgcagatggcagcgggcctctccccagccctgagcactgtgtcagttcctgccttttctcatcagcagaacagaatccttttcctcttttccttcctcctctttggaattttcctgggacctacagaataaagggggggatggacagggggttttcaaaaggaacatggctcactcagagctatatggttagacgtttctccccttttccctaccttccatggtcctggttggccctggctttgcctactagaaaaccaaaacttcccccctggggttttgtgcccactctctgagaagttggggctccatcaagccccattctagtcatgtgcccctttcctgtccctaacagtccacaggcaaacaaatggtacagtcataagagccatctgtcacggacccacgcccagaggaacgtgcagaaaaaagcagagctacatggctgtgggcaactataagccaaatatttggctcagaacaggtgtccatgggacaaaaaagaacgatcctccacttgaccaagaaaaaagtgattctcccagaagcacaaagcatactcttgcccctcaggtgttgcttgtgtacatcgtacccatccattcggcttcacctgcagccaacggcctggaatcgcaaagagacaccactctgggcagagcagagcagggtatggggtggggagagagggtggagggttttataaacaaacttaacagcaatattgaaaggaggtgggggattgagggagggacagagtgttggagggccagagactagtcctgagatggaaacagcaacttgtacagtggctgagaaaataggatatagttttgatttttttaattgtaaaatattttggagggagaacaaaatcttttaacattttgaataaatttagagttttataaaatagaaaaaaaaaaaaaaaaaaaaaaaa

SEQ ID NO: 179 - DNA, 1427 bp, Homo sapiens
accggcgtattcccgccctgcttttcgcccgccgttccgtggcgggaactgaggcgactgtggggacatcagtgatcgtaagtctcctgggcccgttattctcagattaggtgacggagctaagacttcgagaccatctcgtcctttttgtatcgcggaaacctgaggaacgagccggcggcggtgacctgcacgagaagccaggctaactgggtgaagtaccatgcaagcatttcttaaaggtacatccatcagtactaaacccccgctgaccaaggatcgaggagtagctgccagtgcgggaagtagcggagagaacaagaaagccaaacccgttccctgggtggaaaaatatcgcccaaaatgtgtggatgaagttgctttccaggaagaagtggttgcagtgctgaaaaaatctttagaaggagcagatcttcctaatctcttgttttacggaccacctggaactggaaaaacatccactattttggcagcagctagagaactctttgggcctgaacttttccgattaagagttcttgagttaaatgcatctgatgaacgtggaatacaagtagttcgagagaaagtgaaaaattttgctcaattaactgtgtcaggaagtcgctcagatgggaagccgtgtccgccttttaagattgtgattctggatgaagcagattctatgacctcagctgctcaggcagctttaagacgtaccatggagaaggagtcgaaaaccacccgattctgtcttatctgtaactatgtcagtcgaataattgaacccctgacctctagatgttcaaaattccgcttcaagcctctgtcagataaaattcaacagcagcgattactagacattgccaagaaggaaaatgtcaaaattagtgatgagggaatagcttatcttgttaaagtgtcagaaggagacttaagaaaagccattacatttcttcaaagcgctactcgattaacaggtggaaaggagatcacagagaaagtgattacagacattgccggggtaataccagctgagaaaattgatggagtatttgctgcctgtcagagtggctcttttgacaaactagaagctgtggtcaaggatttaatagatgagggtcatgcagcaactcagctcgtcaatcaactccatgatgtggttgtagaaaataacttatctgataaacagaagtctattatcacagaaaaacttgccgaagttgacaaatgcctagcagatggtgctgatgaacatttgcaactcatcagcctttgtgcaactgtgatgcagcagttatctcagaattgttaacgtgaatatatctggatggggggttttgtaaataatgaagttgtaataaaaataaaatgaccaaaagcacctttaaaaaaaaaaaaaaaaaaaaaaaaaaaaaaaaaaaaaa

SEQ ID NO: 180 - DNA, 2099 bp, Homo sapiens
gcgtctgcgtagttcgctcacctccctttctaactccgctgccgccatggctcctgtgaaaaagcttgtggtgaaggggggcaaaaaaaagaagcaagttctgaagttcactcttgattgcacccaccctgtagaagatggaatcatggatgctgccaattttgagcagtttttgcaagaaaggatcaaagtgaacggaaaagctgggaaccttggtggaggggtggtgaccatcgaaaggagcaagagcaagatcaccgtgacatccgaggtgcctttctccaaaaggtatttgaaatatctcaccaaaaaatatttgaagaagaataatctacgtgactggttgcgcgtagttgctaacagcaaagagagttacgaattacgttacttccagattaaccaggacgaagaagaggaggaagacgaggattaaatttcatttatctggaaaattttgtatgagttcttgaataaaacttgggaaccaaaatggtggtttatccttgtatctctgcagtgtggattgaacagaaaattggaaatcatagtcaaagggcttcccttggttcgccactcatttatttgtaacttgacttctttttttttctgcttaaaaatttcaattctcgtggtaataccagagtagaaggagagggtgactttaccgaactgacagccattggggaggcagatgcgggtgtggaggtgtgggctgaaggtagtgactgtttgattttaaaaagtgtgactgtcagttgtatctgttgcttttctcaatgattcagggatacaaatgggcttctctcattcattaaaagaaaacgcgacatctttctaagattctctgtgggaaaatgactgtcaataaaatgcgggtttctgggccattcgtcttactttcattttttgattacaaatttctcttgacgcacacaattatgtctgctaatcctcttcttcctagagagagaaactgtgctccttcagtgttgctgccataaaggggtttggggaatcgattgtaaaagtcccaggttctaaattaactaaatgtgtacagaaatgaacgtgtaagtaatgtttctacaggtctttgcaacaaactgtcactttcgtctccagcagagggagctgtaggaatagtgcttccagatgtggtctcccgtgtggggcccagcaatgggggcccctgatgccaagagctctggaggttcttgaaagaggggacacgaaggaggagtgactgggaagcctcccatgccaaggaggtgggaggtgccctggaaatagctgcctcatgccacttaggccatgactggatttaatgtcagtggtgtgccacagtgcagaggctagacaactgaaaggggctaccaaggctgggaaaaaaatgcaattgttgctgtgagtgactttgaaagactctggtgccttgtggtgcccttctgaaattcaaacagtaatgcaaaagtgtctgcattagaatttacggtgtctaaaattcatgtttttaaaagagcttgcctacagatggtttccacacttgaaattgtgccctgcgagttgcatagctggaagttcaatgctcagtcctaccttggctcccattaaacatttggtgctctgtggattgagttgaacgtgttgaggctttgcaatttcacttgtgttaaaggctctggcatttttccatttctatgcaaatttctttgaagcagaattgcttgcatatttcttctctgccgtcacagaaagcagagtttctttcaaacttcactgaggcatcagttgctctttggcaatgtcccttaaccatgattattaactaagtttgtggcttgagtttacaaattctacttgttgcattgatgttcccatgtagtaagtcatttttagtttggttgtgaaaaaaccctgggctgaagttggcatttcagttaaaagaaaaaaagaaactagtcccagatttgaaaacttgtaataaaattgaaactcactggttttctatgtctttttgaactcttgtaatcgagttttgatcatattttctattaaagtggctaacacctggctactcttactgtaaaaaaaaaaaaaaa

SEQ ID NO: 181 - DNA, 3117 bp, Homo sapiens
attcgaaccccgtcgcgcccctttgtgcgtcacgggtggcgggcgcgggaaggggatttggattgttgcgcctctgctctgaagaaagtgctgtctggctccaactccagttctttcccctgagcagcgcctggaacctaacccttcccactctgtcaccttctcgatcccgccggcgctttagagccgcagtccagtcttggatccttcagagcctcagccactagctgcgatgcatgtgatcaagcgagatggccgccaagaacgagtcatgtttgacaaaattacatctcgaatccagaagctttgttatggactcaatatggattttgttgatcctgctcagatcaccatgaaagtaatccaaggcttgtacagtggggtcaccacagtggaactagatactttggctgctgaaacagctgcaaccttgactactaagcaccctgactatgctatcctggcagccaggatcgctgtctctaacttgcacaaagaaacaaagaaagtgttcagtgatgtgatggaagacctctataactacataaatccacataatggcaaacactctcccatggtggccaagtcaacattggatattgttctggccaataaagatcgcctgaattctgctattatctatgaccgagatttctcttacaattacttcggctttaagacgctagagcggtcttatttgttgaagatcaatggaaaagtggctgaaagaccacaacatatgttgatgagagtatctgttgggatccacaaagaagacattgatgcagcaattgaaacatataatcttctttctgagaggtggtttactcatgcttcgcccactctcttcaatgctggtaccaaccgcccacaactttctagctgttttcttctgagtatgaaagatgacagcattgaaggcatttatgacactctaaagcaatgtgcattgatttctaagtctgctggaggaattggtgttgctgtgagttgtattcgggctactggcagctacattgctgggactaatggcaattccaatggccttgtaccgatgctgagagtatataacaacacagctagatatgtggatcaaggtgggaacaagcgtcctggggcatttgctatttacctggagccttggcatttagacatctttgaattccttgatttaaagaagaacacaggaaaggaagagcagcgtgccagagatcttttctttgctctttggattccggatctcttcatgaaacgagtggagactaatcaggactggtctttgatgtgtccaaatgagtgtcctggtctggatgaggtttggggagaggaatttgagaaactatatgcaagttatgagaaacaaggtcgtgtccgcaaagttgtaaaagctcagcagctttggtatgccatcattgagtctcagacggaaacaggcaccccgtatatgctctacaaagattcctgtaatcgaaagagcaaccagcagaacctgggaaccatcaaatgcagcaacctgtgcacagaaatagtggagtacaccagcaaagatgaggttgctgtttgtaatttggcttccctggccctgaatatgtatgtcacatcagaacacacatacgactttaagaagttggctgaagtcactaaagtcgttgtccgaaacttgaataaaattattgatataaactactatcctgtaccagaggcatgcctatcaaataaacgccatcgccccattggaattggggtacaaggtctggcagatgcttttatcctgatgagatacccttttgagagtgcagaagcccagttactgaataagcagatctttgaaactatttattatggtgctctggaagccagctgtgaccttgccaaggagcagggcccatacgaaacctatgagggctctccagttagcaaaggaattcttcagtatgatatgtggaatgttactcctacagacctatgggactggaaggttctcaaggagaagattgcaaagtatggtataagaaacagtttacttattgccccgatgcctacagcttccactgctcagatcctggggaataatgagtccattgaaccttacaccagcaacatctatactcgcagagtcttgtcaggagaatttcagattgtaaatcctcacttattgaaagatcttaccgagcggggcctatggcatgaagagatgaaaaaccagattattgcatgcaatggctctattcagagcataccagaaattcctgatgacctgaagcaactttataaaactgtgtgggaaatctctcagaaaactgttctcaagatggcagctgagagaggtgctttcattgatcaaagccaatctttgaacatccacattgctgagcctaactatggcaaactcactagtatgcacttctacggctggaagcagggtttgaagactgggatgtattatttaaggacaagaccagcagctaatccaatccagttcactctaaataaggagaagctaaaagataaagaaaaggtatcaaaagaggaagaagagaaggagaggaacacagcagccatggtgtgctctttggagaatagagatgaatgtctgatgtgtggatcctgaggaaagacttggaagagaccagcatgtcttcagtagccaaactacttcttgagcatagataggtatagtgggtttgcttgaggtggtaaggctttgctggaccctgttgcaggcaaaaggagtaattgatttaaagtactgttaatgatgttaatgatttttttttaaactcatatattgggattttcaccaaaataatgcttttgaaaaaaagaaaaaaaaaacggatatattgagaatcaaagtagaagttttaggaatgcaaaataagtcatcttgcatacagggagtggttaagtaaggtttcatcacccatttagcatgcttttctgaagacttcagttttgttaaggagatttagttttactgctttgactggtgggtctctagaagcaaaactgagtgataactcatgagaagtactgataggacctttatctggatatggtcctataggttattctgaaataaagataaacatttctaagtgaaaaaaaaaaaaaaaa

SEQ ID NO: 182 - DNA, 2500 bp, Homo sapiens
cccaggcgcagccaatgggaagggtcggaggcatggcacagccaatgggaagggccggggcaccaaagccaatgggaagggccgggagcgcgcggcgcgggagatttaaaggctgctggagtgaggggtcgcccgtgcaccctgtcccagccgtcctgtcctggctgctcgctctgcttcgctgcgcctccactatgctctccctccgtgtcccgctcgcgcccatcacggacccgcagcagctgcagctctcgccgctgaaggggctcagcttggtcgacaaggagaacacgccgccggccctgagcgggacccgcgtcctggccagcaagaccgcgaggaggatcttccaggagcccacggagccgaaaactaaagcagctgcccccggcgtggaggatgagccgctgctgagagaaaacccccgccgctttgtcatcttccccatcgagtaccatgatatctggcagatgtataagaaggcagaggcttccttttggaccgccgaggaggttgacctctccaaggacattcagcactgggaatccctgaaacccgaggagagatattttatatcccatgttctggctttctttgcagcaagcgatggcatagtaaatgaaaacttggtggagcgatttagccaagaagttcagattacagaagcccgctgtttctatggcttccaaattgccatggaaaacatacattctgaaatgtatagtcttcttattgacacttacataaaagatcccaaagaaagggaatttctcttcaatgccattgaaacgatgccttgtgtcaagaagaaggcagactgggccttgcgctggattggggacaaagaggctacctatggtgaacgtgttgtagcctttgctgcagtggaaggcattttcttttccggttcttttgcgtcgatattctggctcaagaaacgaggactgatgcctggcctcacattttctaatgaacttattagcagagatgagggtttacactgtgattttgcttgcctgatgttcaaacacctggtacacaaaccatcggaggagagagtaagagaaataattatcaatgctgttcggatagaacaggagttcctcactgaggccttgcctgtgaagctcattgggatgaattgcactctaatgaagcaatacattgagtttgtggcagacagacttatgctggaactgggttttagcaaggttttcagagtagagaacccatttgactttatggagaatatttcactggaaggaaagactaacttctttgagaagagagtaggcgagtatcagaggatgggagtgatgtcaagtccaacagagaattcttttaccttggatgctgacttctaaatgaactgaagatgtgcccttacttggctgattttttttttccatctcataagaaaaatcagctgaagtgttaccaactagccacaccatgaattgtccgtaatgttcattaacagcatctttaaaactgtgtagctacctcacaaccagtcctgtctgtttatagtgctggtagtatcaccttttgccagaaggcctggctggctgtgacttaccatagcagtgacaatggcagtcttggctttaaagtgaggggtgaccctttagtgagcttagcacagcgggattaaacagtcctttaaccagcacagccagttaaaagatgcagcctcactgcttcaacgcagattttaatgtttacttaaatataaacctggcactttacaaacaaataaacattgttttgtactcacggcggcgataatagcttgatttatttggtttctacaccaaatacattctcctgaccactaatgggagccaattcacaattcactaagtgactaaagtaagttaaacttgtgtagactaagcatgtaatttttaagttttattttaatgaattaaaatatttgttaaccaactttaaagtcagtcctgtgtatacctagatattagtcagttggtgccagatagaagacaggttgtgtttttatcctgtggcttgtgtagtgtcctgggattctctgccccctctgagtagagtgttgtgggataaaggaatctctcagggcaaggagcttcttaagttaaatcactagaaatttaggggtgatctgggccttcatatgtgtgagaagccgtttcattttatttctcactgtattttcctcaacgtctggttgatgagaaaaaattcttgaagagttttcatatgtgggagctaaggtagtattgtaaaatttcaagtcatccttaaacaaaatgatccacctaagatcttgcccctgttaagtggtgaaatcaactagaggtggttcctacaagttgttcattctagttttgtttggtgtaagtaggttgtgtgagttaattcatttatatttactatgtctgttaaatcagaaattttttattatctatgttcttctagattttacctgtagttcataaaaaaaaaaaaaaaaaaaaaaaaa

SEQ ID NO: 183 - DNA, 5189 bp, Homo sapiens
ggactgcgaaaggagcagggttgcggagctagggctccagcctgcggccgcgcattcttgcgtctggccagccgcgagctctaagggtcggccccgcccggtccgcccccgcggctccctgccaggctctcgcgggcgcgctcggggtggggcctcgcggctggcggagatgcggccggggctgcgcggtggtgatgcgagcctgctgggcggcgcgccggggcagccggagccgcgcgccgcggcgctgtaatcggacaccaagagcgctcgcccccggcctccggccactttccattcactccgaggtgcttgattgagcgacgcggagaagagctccgggtgccgcggcactgcagcgctgagattcctttacaaagaaactcagaggaccgggaagaaagaatttcacctttgcgacgtgctagaaaataaggtcgtctgggaaaaggactggagacacaagcgcatccaaccccggtagcaaactgatgacttttccgtgctgatttctttcaacctcggtattttcccttggatattaacttgcatatctgaagaaatggcattccggacaatttgcgtgttggttggagtatttatttgttctatctgtgtgaaaggatcttcccagccccaagcaagagtttatttaacatttgatgaacttcgagaaaccaagacctctgaatacttcagcctttcccaccatcctttagactacaggattttattaatggatgaagatcaggaccggatatatgtgggaagcaaagatcacattctttccctgaatattaacaatataagtcaagaagctttgagtgttttctggccagcatctacaatcaaagttgaagaatgcaaaatggctggcaaagatcccacacacggctgtgggaactttgtccgtgtaattcagactttcaatcgcacacatttgtatgtctgtgggagtggcgctttcagtcctgtctgtacttacttgaacagagggaggagatcagaggaccaagttttcatgattgactccaagtgtgaatctggaaaaggacgctgctctttcaaccccaacgtgaacacggtgtctgttatgatcaatgaggagcttttctctggaatgtatatagatttcatggggacagatgctgctatttttcgaagtttaaccaagaggaatgcggtcagaactgatcaacataattccaaatggctaagtgaacctatgtttgtagatgcacatgtcatcccagatggtactgatccaaatgatgctaaggtgtacttcttcttcaaagaaaaactgactgacaataacaggagcacgaaacagattcattccatgattgctcgaatatgtcctaatgacactggtggactgcgtagccttgtcaacaagtggaccactttcttaaaggcgaggctggtgtgctcggtaacagatgaagacggcccagaaacacactttgatgaattagaggatgtgtttctgctggaaactgataacccgaggacaacactagtgtatggcatttttacaacatcaagctcagttttcaaaggatcagccgtgtgtgtgtatcatttatctgatatacagactgtgtttaatgggccttttgcccacaaagaagggcccaatcatcagctgatttcctatcagggcagaattccatatcctcgccctggaacttgtccaggaggagcatttacacccaatatgcgaaccaccaaggagttcccagatgatgttgtcacttttattcggaaccatcctctcatgtacaattccatctacccaatccacaaaaggcctttgattgttcgtattggcactgactacaagtatacaaagatagctgtggatcgagtgaacgctgctgatgggagataccatgtcctgtttctcggaacagatcggggtactgtgcaaaaagtggttgttcttcctactaacaactctgtcagtggcgagctcattctggaggagctggaagtctttaagaatcatgctcctataacaacaatgaaaatttcatctaaaaagcaacagttgtatgtgagttccaatgaaggggtttcccaggtatctctgcaccgctgccacatctatggtacagcctgtgctgactgctgcctggcgcgggacccttattgcgcctgggatggccattcctgttccagattctacccaactgggaaacggaggagccgaagacaagatgtgagacatggaaacccactgactcaatgcagaggatttaatctaaaagcatacagaaatgcagctgaaattgtgcagtatggagtaaaaaataacaccacttttctggagtgtgcccccaagtctccgcaggcatctatcaagtggctgttacagaaagacaaagacaggaggaaagaggttaagctgaatgaacgaataatagccacttcacagggactcctgatccgctctgttcagggttctgaccaaggactttatcactgcattgctacagaaaatagtttcaagcagaccatagccaagatcaacttcaaagttttagattcagaaatggtggctgttgtgacggacaaatggtccccatggacctgggccagctctgtgagggctttacccttccacccgaaggacatcatgggggcattcagccactcagaaatgcagatgattaaccaatattgcaaagacactcggcagcaacatcagcagggagatgaatcacagaaaatgagaggggactatggcaagttaaaggccctcatcaatagtcggaaaagtagaaacaggaggaatcagttgccagagtcataatattttcttatgtgggtcttatgcttccattaacaaatgctctgtcttcaatgatcaaattttgagcaaagaaacttgtgctttaccaaggggaattactgaaaaaggtgattactcctgaagtgagttttacacgaactgaaatgagcatgcattttcttgtatgatagtgactagcactagacatgtcatggtcctcatggtgcatataaatatatttaacttaacccagattttatttatatctttattcaccttttcttcaaaatcgatatggtggctgcaaaactagaattgttgcatccctcaattgaatgagggccatatccctgtggtattcctttcctgctttggggctttagaattctaattgtcagtgattttgtatatgaaaacaagttccaaatccacagcttttacgtagtaaaagtcataaatgcatatgacagaatggctatcaaaagaaatagaaaaggaagacggcatttaaagttgtataaaaacacgagttattcataaagagaaaatgatgagtttttatggttccaatgaaatatgttggggtttttttaagattgtaaaaataatcagttactggtatctgtcactgacctttgtttccttattcaggaagataaaaatcagtaacctaccccatgaagatatttggtgggagttatatcagtgaagcagtttggtttatattcttatgttatcaccttccaaacaaaagcacttactttttttggaagttatttattttagactcaaagaatataatcttgcactactcagttattactgtttgttctcttattccctagtctgtgtggcaaattaaacaatataagaaggaaaaatttgaagtattagacttctaaataaggggtgaaatcatcagaaagaaaaatcaaagtagaaactactaattttttaagaggaatttataacaaatatggctagttttcaacttcagtactcaaattcaatgattcttccttttattaaaaccagtctcagatatcatactgatttttaagtcaacactatatattttatgatcttttcagtgtgatggcaaggtgcttgttatgtctagaaagtaagaaaacaatatgaggagacattctgtctttcaaaaggtaatggtacatacgttcactggtctctaagtgtaaaagtagtaaattttgtgatgaataaaataattatctcctaattgtatgttagaataattttattagaataatttcatactgaaattattttctccaaataaaaattagatggaaaaatgtgaaaaaaattattcatgctctcatatatattttaaaaacactacttttgcttttttatttaccttttaagacattttcatgcttccaggtaaaaacagatattgtaccatgtacctaatccaaatatcatataaacattttatttatagttaataatctatgatgaaggtaattaaagtagattatggcctttttaagtattgcagtctaaaacttcaaaaactaaaatcattgtcaaaattaatatgattattaatcagaatatcagaatatgattcactatttaaactatgataaattatgataatatatgaggaggcctcgctatagcaaaaatagttaaaatgctgacataacaccaaacttcattttttaaaaaatctgttgttccaaatgtgtataattttaaagtaatttctaaagcagtttattataatggtttgcctgcttaaaaggtataattaaacttcttttctcttctacattgacacacagaaatgtgtcaatgtaaagccaaaaccatcttctgtgtttatggccaatctattctcaaagttaaaagtaaaattgtttcagagtcacagttccctttatttcacataagcccaaactgatagacagtaacggtgtttagttttatactatatttgtgctatttaattctttctattttcacaattattaaattgtgtacactttcattacttttaaaaatgtagaaattcttcatgaacataactctgctgaatgtaaaagaaaattttttttcaaaaatgctgttaatgtatactactggtggttgattggttttattttatgtagcttgacaattcagtgacttaatatctattccatttgtattgtacataaaattttctagaaatacacttttttccaaagtgtaagtttgtgaatagattttagcatgatgaaactgtcataatggtgaatgttcaatctgtgtaagaaaacaaactaaatgtagttgtcacactaaaatttaattggatattgatgaaatcattggcctggcaaaataaaacatgttgaattccccaaaaaaaaaaaaaaaa

SEQ ID NO: 184 - DNA, 3224 bp, Homo sapiens
agcggtaaatttgaaatggctgacgggtcgctgacgggcggcggtctggaggcagcggccatggcgccggagcgcacgggctgggcggtggagcaggagctggcgtctctggagaaaggtttgttccaagatgaagattcatgcagtgattgtagctaccgtgataaaccaggttctagtttacaaagttttatgccagaaggaaaaacctttttcccagaaattttccaaacaaatcaacttttgttctatgagcgattcagagcctatcaagattacattttagctgactgcaaggcctctgaggtacaggaattcacagctgagttcttggagaaggtccttgagccatctggatggcgggcagtctggcacactaatgtgttcaaggtgctggttgagatcacagatgtggactttgcagccttgaaggcagtggtgaggcttgctgaaccatacctctgtgactctcaagtgagcacttttaccatggagtgcatgaaggagctccttgatctgaaggagcatcggttgcccctgcaggagctgtgggtggtgtttgatgattcaggagtgtttgaccagacagcccttgcaattgagcatgtcagatttttctaccaaaacatttggaggagttgggatgaagaagaggaggatgaatacgattattttgtcagatgtgttgaacctcgattaagattgcattatgacattcttgaagaccgagttccatcaggacttattgttgactaccacaatctgttgtctcaatgtgaggagagttacaggaaatttttaaatctgagaagcagtttgtcaaattgtaactctgattccgagcaggaaaatatctccatggtggaagggttaaaattgtattcggagatggaacagttgaaacaaaagctgaaactcattgagaatcctttgttgaggtatgtgtttggttatcagaagaattctaacatccaagcaaagggtgtccgttccagcggtcagaagatcactcatgtggtctcctccaccatgatggctggtctcctgcggtccctgcttacggacaggctttgccaggagcctggtgaggaagaaagagaaattcagttccatagtgatccattgtctgctataaatgcctgcttcgaaggtgacactgttattgtttgtcctggccattatgtggtacatggcactttctccattgctgactccattgagttggaaggatatggcctaccagatgacattgtgatagaaaagaggggcaaaggcgacacttttgtggactgcactggtgctgatattaaaatctcaggcataaaatttgttcagcatgatgctgtagagggaatcttaattgttcaccgtggtaagactacgctggaaaactgtgtgctgcagtgtgagacgaccggagtcacagtgcggacatcagcagagtttctaatgaagaactcggatttatatggcgccaagggtgctggtatagaaatctaccctgggagtcagtgcaccctgagtgacaatgggatccatcactgcaaggaagggatcctcattaaggacttcttagatgaacattatgacattcccaagatatccatggtgaataatataatacataataatgaaggttatggtgttgtcttggtgaaacctacaatcttctctgacctgcaagaaagtgctgaagatggaactgaagaaaataaagcgcttaaaattcagacaagtggagagccagatgtggctgaaagagtggatctagaagagctgattgagtgtgcaactggtaaaatggagctttgtgcaagaactgacccttctgagcaagtcgagggaaattgtgaaattgtaaatgaactaattgctgcctccacacagaaaggccagataaagaagaaaaggttgagtgaactggggatcacgcaagctgatgacaacttaatgtcacaggagatgtttgttgggattgtggggaaccagttcaagtggaatgggaaaggtagttttggcacatttcttttctgactacagtgatgtaagtagatagcaaaatactggattttgcacatgctgccctaagaatcactgctgccattgtagtttgctgtattgtctgtattttatatttgattatttgggcttgagtgaaaggtagatttatttccatttgcaggtgttgcacataaaacactccctctttataagaaaaatcataaatgcatataaaatagaaaatatttggagattgcttatctgaaagtcttgctttcttatacacatggttctctcatattaagcctggtggtaactttttagtgtaattacctttagcacttcaaagacgaggaagtaaggaagggaatgcaagactagtgcataaaaatgcaataggtgtcatatgtacagcattcttcttagagttgccttttcatcccaattacagtgagtctgatttccatcctgtatttgcataatacttgtcttaaaataaaagcttttatgattgggaatttatctgcctaatcagacttattattgagacgtcaatgggacgcatttttctgttgagctatgcagtcgtcaaaacagcgatagacagcataggaggtttgaagcagaaatgaaatgtgttattcagagccaatgttgtacatagagcattttcactattgctgaatgggaatgattaaaaacaaggtatttttcgggccaggcggtggctcacgcttgtaatcgcagcactttgggaggctgaggcaggaggatcacttgagcccaggagttcaagactagcctaggcaacatagtgagaccctgtctctactaaaaataaatttaaaaaaaattagctgagtgtggtggtgcatgcatgtagttccagctactcaggaggctgaggctagaggatccttgagcccaggaggttgaggctgcagtgaggtgtgattgcgccactgcattccagcttgggcgacagagcgagacccagtctcaaaaaaaaaaaaagtatttttctcttaccgttacagtattctgattatattactgacacagtcaaaatgattaactgtacaacctgtatctgctgggtgttcttgttatcatattgtaaaacagctttaaaaatatttatattttaaaaactgtatgtgacattaatatgcctaatgattaaaattatagtgatgaaataacaaagaaaaaaaaaaaaaaaa

SEQ ID NO: 185 - DNA, 1600 bp, Homo sapiens
gaattccgggctgtagagccttgcgcgcgcagtggggatggaacgttgctaggcttagcgggtctggctgctgggggcccgagcagcacgctcggagccgccgcgcgccaaagcgggaatctgggaggcgagcagctctgcagttaatgcacgtattttaaactcccgggcctgcggacgctatgcacaggaagcacctccaggagattccagacctgagtagcaacgttgccaccagcttcacgtggggatgggattccagcaagacttctgaactgctgtcaggcatgggggtctccgccctggagaaagaggagcccgacagtgagaacatcccccaggaactgctctcaaacctgggccacccggagagccccccacggaaacggctgaagagcaaagggagtgacaaagactttgtgattgtccgcaggcctaagctaaatcgagagaactttccaggtgtttcatgggactcccttccggatgagctgctcttgggaatcttttcctgtctgtgcctccctgagctgctaaaggtctctggtgtttgtaagaggtggtatcgcctagcgtctgatgagtctctatggcagaccttagacctcacaggtaaaaatctgcacccggatgtgactggtcggttgctgtctcaaggggtgattgccttccgctgcccacgatcatttatggaccaaccattggctgaacatttcagcccttttcgtgtacagcacatggacctatcgaactcagttatagaagtgtccaccctccacggcatactgtctcagtgttccaagttgcagaatctaagcctggaaggcctgcggctttcggatcccattgtcaatactctcgcaaaaaactcaaatttagtgcgacttaacctttctgggtgttctggattctctgaatttgccctgcagactttgctaagcagctgttccagactggatgagctgaacctctcctggtgttttgatttcactgaaaagcatgtacaggtggctgttgcgcatgtgtcagagaccatcacccagctgaatcttagcggctacagaaagaatctccagaaatcagatctctctactttagttagaagatgccccaatcttgtccatctagacttaagtgatagtgtcatgctaaagaatgactgctttcaggaatttttccagctcaactacctccaacacctatcactcagtcggtgctatgatataatacctgaaactttacttgaacttggagaaattcccacactaaaaacactacaagtttttggaatcgtgccagatggtacccttcaactgttaaaggaagcccttcctcatctacagattaattgctcccatttcaccaccattgccaggccaactattggcaacaaaaagaaccaggagatatggggcatcaaatgccgactgacactgcaaaagcccagttgtctatgaagtatttattgcaggatggtgtctcttctttagaacagggaaaataggcaggaagcccaattgctggagtacttagctagttttattcttggttttccctttgccttcattctgcaagtatactagggagccatttgagaggg

SEQ ID NO: 186 - DNA, 4166 bp, Homo sapiens
cggcgcgggtgttgagagcggtgtggtaggtgttgtagccgctatggtgaagttcgctttgtagcggccccggctagagagttggcctgttccctgcctttgtgacccggaggagcttttgggggtgcgtcaagcccctggcctgaggcagcgaactggtttgtggcctgtttgattcctgtcagaggtttgctgacccaagacagtatcgaaaatgcatattaagtcaattattctagagggattcaagtcctatgctcagaggaccgaagtcaatggttttgaccccctcttcaatgctatcactggcttaaatggtagtgggaaatccaacatattggactccatctgctttttactgggcatctccaacctgtctcaggttcgggcttctaatttacaagatttagtttacaaaaatgggcaggctggtattaccaaagcctctgtgtcaatcacttttgataattctgacaaaaagcaaagtcctttaggatttgaggttcatgatgaaatcacagtaacaaggcaggtggttattggtggtagaaataaatatttaatcaatggagtcaatgccaacaacaccagagtacaggatctcttctgttctgttggccttaatgttaacaaccctcactttctcatcatgcagggccgaattacaaaagtattgaatatgaaaccaccagagattttatccatgatagaagaagcagctggaaccaggatgtatgaatacaaaaaaatagctgcacagaaaactatagaaaaaaaggaggctaagctgaaagaaattaagacgatacttgaagaagagattactccaaccattcaaaaattaaaagaggaaagatcgtcctacttggagtaccaaaaagtaatgagagaaatagaacatttgagtcgtttatatattgcttatcagtttttgctggctgaagataccaaagtacgctcagctgaggaattaaaagaaatgcaagataaagttataaagcttcaggaagaattgtctgagaatgataaaaaaataaaagcacttaatcatgaaatagaagaattggaaaaaagaaaagataaggaaactggagttatacttcgatctttagaagatgctcttgcagaggctcagcgagttaatactaaatctcaaagcgcatttgatctcaagaagaaaaatctggcatgtgaggaaagcaaacgcaaagagctggaaaaaaatatggttgaggactcaaaaactttagcagcaaaggaaaaagaggttaaaaagataacagatggactgcatgcccttcaagaagcaagtaataaagatgctgaagctctggcagctgcacagcagcacttcaatgctgtttccgctggcctgtccagtaatgaagatggagcagaagcaactcttgctggtcaaatgatggcctgtaaaaatgatataagtaaagctcagacagaagccaaacaggctcagatgaagttgaagcatgctcaacaggaattaaagaataaacaagctgaagttaagaagatggatagtggctacaggaaggatcaagaagctctagaagctgtaaaaagacttaaagaaaaacttgaagctgaaatgaaaaagctaaattatgaagaaaataaagaggaaagccttttggaaaagcgcaggcagctgtctcgtgatattggtagattgaaagaaacatatgaagctctattagccagatttcccaatcttcgatttgcatacaaggatccagagaagaactggaatagaaattgtgtgaaaggacttgtggcttctctgattagtgtgaaagacacttctgcaaccacagctttagaattagtggctggagaacgactctacaatgttgtagtagacacagaagttactggtaaaaagctactagaaaggggggaactgaaacgtcgatacactataattccactcaataaaatttcagccagatgtattgcaccagaaactctgagagttgctcagaatcttgttggccctgacaacgttcatgtggctctttccttggttgaatataaaccagaacttcagaaagcaatggagtttgtctttggaacaacatttgtttgtgacaatatggataatgccaaaaaagtggcctttgataagaggataatgactagaactgtaactctcggaggtgatgtgtttgatcctcatgggacattgagtggaggtgctcgatcccaggcagcttccattttaaccaagtttcaagaactcaaagatgttcaggatgaactgagaatcaaagagaatgagctgcgggctctagaagaggaattagcaggtcttaaaaacactgctgaaaagtatcgccaactaaaacagcagtgggagatgaaaactgaagaggcagatttattacaaaccaagctccagcaaagctcatatcacaagcaacaagaagaattagatgcccttaaaaaaaccattgaggaaagtgaggagactttgaaaaacactaaagaaatccaaagaaaagcagaagaaaaatatgaagtattggaaaataaaatgaaaaatgcagaagctgaaagagagcgagaactgaaagatgctcagaaaaaactggattgtgccaaaacaaaggcagatgcatctagcaagaagatgaaagaaaaacaacaggaagttgaagctatcactctggaactggaagagctcaagagagagcatacatcttacaaacaacagcttgaagctgtaaatgaagctatcaaatcctatgaaagtcagattgaagtaatggcagctgaggtggctaaaaataaggagtcagtaaataaagctcaagaagaggtgaccaagcaaaaagaggtgataacagcccaagacactgtaattaagctaaatatgcagaagtggcaaaacacaaggagcaaaacaatgattctcagccttaaaattaaggaattagaccaccacatcagcaaacataaacgggaggctgaagatggtgctgcaaaggtatccaaaatgttgaaagattatgactggattaatgcagagagacacctctttggccaacccaatagtgcctatgatttcaaaactaacaaccctaaagaagctggtcagagacttcagaagttgcaagaaatgaaggagaaactaggaagaaatgtcaatatgagagctatgaatgtattgacagaagctgaagagcgatgcaatgacttgatgaagaagaagagaattgtagaaaatgacaaatccaaaattcttacaactatagaagaccttgaccagaagaaaaaccaagccctaaatattgcatggcaaaaggtgaacaaggactttgggtctattttttctactcttttgcctggtgctaatgctatgcttgcaccaccagagggtcaaactgttttggatggtctggagttcaaggttgccttaggaaatacctggaaagaaaacctaactgaacttagtggtggtcagaggtctttagtggccttgtcattaatactgtccatgcttctcttcaaacctgctccaatttatatccttgatgaggtagatgcagccttggatctttctcatacccaaaacattggacagatgctgcgtactcatttcacacattctcagttcattgtggtgtcactaaaagaaggtatgttcaacaatgcaaacgttcttttcaaaaccaagtttgtggatggtgtttctacagtagccagatttactcaatgtcaaaatggaaagatttcaaaggaagcaaaatccaaggcaaaaccacccaaaggagcacatgtggaagtttaaactacaaagttatttcttcatcttgacctgtttttttaaatgtaaacttttaaggacttgagataactaatttgtttatatacaaaaattaatgttactgtgttacttaacccatgttttctctttatataatcacttatcgcttacaaatgagcatatattcctcatctcttaactagtctaattatggtccaattattgtggttgtgattttatgcatatccatcaaaatgttttttttcttatgcgggtcttttatatattagggatcctgagatacccgattctatatgtaaaagctaatatacaaaaaagcagattaaattacatgataaatgtagctgaaaaaaaaaaaaaa

SEQ ID NO: 187 - DNA, 5297 bp, Homo sapiens
caacaaactaagcagttgctcaatcgttgattgatcctcaggcacgtctagattttcccacttacataggtcttgttaagaaaccagtcctgccttcttgccactcgtgtctttcgatggctcccttcccgaagtcccgctgcctctaagcggagtgttaagcggggctctcggaagccggtggaccgagatttccccgggtggggcgggcgcggtgtagcggcccgcgggctgacttgctcccggctgtcccccggccccagcgaccatgccccgtaaaggcacccagccctccactgcccggcgcagagaggaagggccgccgccgccgtcccctgacggcgccagcagcgacgcggagcctgagccgccgtccggccgcacggagagcccagccaccgccgcagagactgcaagtgaggaacttgataatagaagtttagaagagattttgaacagcattcctcctcccccgcctccagcaatgaccaatgaagctggagctcctcggcttatgataactcatattgtaaaccagaacttcaaatcctatgctggggagaaaattctgggacctttccataagcgcttttcctgtattatcgggccaaatggcagtggcaaatccaatgttattgattctatgctttttgtgtttggctatcgagcacaaaaaataagatctaaaaaactctcagtattaatacataattctgatgaacacaaggacattcagagttgtacagtagaagttcattttcaaaagataattgataaggaaggggatgattatgaagtcattcctaacagtaatttctatgtatccagaacggcctgcagagataatacttctgtctatcacataagtggaaagaaaaagacatttaaggatgttggaaatcttcttcgaagccatggaattgacttggaccataatagatttttaattttacagggtgaagttgaacaaattgctatgatgaaaccaaaaggccagactgaacacgatgagggtatgcttgaatatttagaagatataattggttgtggacggctaaatgaacctattaaagtcttgtgtcggagagttgaaatattaaatgaacacagaggagagaagttaaacagggtaaagatggtggaaaaggaaaaggatgccttagaaggagagaaaaacatagctatcgaatttcttaccttggaaaatgaaatatttagaaaaaagaatcatgtttgtcaatattatatttatgagttgcagaaacgaattgctgaaatggaaactcaaaaggaaaaaattcatgaagataccaaagaaattaatgagaagagcaatatactatcaaatgaaatgaaagctaagaataaagatgtaaaagatacagaaaagaaactgaataaaattacaaaatttattgaggagaataaagaaaaatttacacagctagatttggaagatgttcaagttagagaaaagttaaaacatgccacgagtaaagccaaaaaactggagaaacaacttcaaaaagataaagaaaaggttgaagaatttaaaagtatacctgccaagagtaacaatatcattaatgaaacaacaaccagaaacaatgccctcgagaaggaaaaagagaaagaagaaaaaaaattaaaggaagttatggatagccttaaacaggaaacacaagggcttcagaaagaaaaagaaagtcgagagaaagaacttatgggtttcagcaaatcggtaaatgaagcacgttcaaagatggatgtagcccagtcagaacttgatatctatctcagtcgtcataatactgcagtgtctcaattaactaaggctaaggaagctctaattgcagcttctgagactctcaaagaaaggaaagctgcaatcagagatatagaaggaaaactccctcaaactgaacaagaattaaaggagaaagaaaaagaacttcaaaaacttacacaagaagaaacaaactttaaaagtttggttcatgatctctttcaaaaagttgaagaagcaaagagctcattagcaatgaatcgaagtagggggaaagtccttgatgcaataattcaagaaaaaaaatctggcaggattccaggaatatatggaagattgggggacttaggagccattgatgaaaaatacgacgtggctatatcatcctgttgtcatgcactggactacattgttgttgattctattgatatagcccaagaatgtgtaaacttccttaaaagacaaaatattggagttgcaacctttataggtttagataagatggctgtatgggcgaaaaagatgaccgaaattcaaactcctgaaaatactcctcgtttatttgatttagtaaaagtaaaagatgagaaaattcgccaagctttttattttgctttacgagataccttagtagctgacaacttggatcaagccacaagagtagcatatcaaaaagatagaagatggagagtggtaactttacagggacaaatcatagaacagtcaggtacaatgactggtggtggaagcaaagtaatgaaaggaagaatgggttcctcacttgttattgaaatctctgaagaagaggtaaacaaaatggaatcacagttgcaaaacgactctaaaaaagcaatgcaaatccaagaacagaaagtacaacttgaagaaagagtagttaagttacggcatagtgaacgagaaatgaggaacacactagaaaaatttactgcaagcatccagcgtttaatagagcaagaagaatatttgaatgtccaagttaaggaacttgaagctaatgtacttgctacagcccctgacaaaaaaaagcagaaattgctagaagaaaacgttagtgctttcaaaacagaatatgatgctgtggctgagaaagctggtaaagtagaagctgaggttaaacgcttacacaataccatcgtagaaatcaataatcataaactcaaggcccaacaagacaaacttgataaaataaataagcaattagatgaatgtgcttctgctattactaaagcccaagtagcaatcaagactgctgacagaaaccttcaaaaggcacaagactctgtcttgcgtacagagaaagaaataaaagatactgagaaagaggtggatgacctaacagcagagctgaaaagtcttgaggacaaagcagcagaggtcgtaaagaatacaaatgctgcagaggaatccttaccagagatccagaaagaacatcgcaatctgcttcaagaattaaaagttattcaagaaaatgaacatgctcttcaaaaagatgcacttagtattaagttgaaacttgaacaaatagatggtcacattgctgaacataattctaaaataaaatattggcacaaagagatttcaaaaatatcactgcatcctatagaagataatcctattgaagagatttcggttctaagcccagaggatcttgaagcgatcaagaatccagattctataacaaatcaaattgcacttttggaagcccggtgtcatgaaatgaaaccaaacctcggtgccatcgcagagtataaaaagaaggaagaattgtatttgcaacgggtagcagaattggacaaaattacttatgaaagagacagttttagacaggcatatgaagatcttcggaaacaaaggcttaatgaatttatggcaggtttttatataataacaaataaattaaaggaaaattaccaaatgcttactttgggaggggacgccgaactcgagcttgtagacagcttggatcctttctctgaaggaatcatgttcagtgttcgaccacctaagaaaagttggaaaaagatcttcaacctttcgggaggagagaaaacacttagttcattggctttagtatttgctcttcaccactacaagcccactcccctttacttcatggatgagattgatgcagcccttgattttaaaaatgtgtccattgttgcattttatatatatgaacaaacaaaaaatgcacagttcataataatttctcttcgaaataatatgtttgagatttcggatagacttattggaatttacaagacatacaacataacaaaaagtgttgctgtaaatccaaaagaaattgcatctaagggactttgttgaactttatgctgaagattcttcaagttgattcagtgtattactgatttttttctatttgtaaaggattatgagttgtataaaatacatactccctaaactagatcatgaaactggtttctgttttatgcagttgtcatttgtaaagtctaataaaatattctctataattgcttctagattacaaaaatatgacaatcttgtaagtagcagactatggagaaaaatgagttacctggagggtcaggtaacttgccaaactaaaaagtatgttagttgaggcaaagtcctaagcaaggttgtgctatcaaggctcagcataccttcgtgggcctttgatttaccaacactggaaatgcctgccaactaatcttggatagattctttaaggcattccacttagcttgccagttgagacaatcaccacagttattacccaaatactatgaacatatttttgtaaaccagtcattctgaattatagtgatgagaatttaaatatatgcttttctagaatttgatgtttgaccatttatgacttaattaccagagagccagtaaattaggacagtgtttcaacaagcctaggctatctcgtaagttgaaaaatatcccactatagttgcttcatgagtatgaagtaagatggcctctgatttacactggttcaatttacaaattttcaactttatgataggtttatccgggtactaaatgcatttcaacttgatagtttcaacttatgataggtttaccaggatgtagtcccactgttgaggagcatctatttaggggttaattactttagtaataagtggaaagtaagataccttgagtaatgtttgcctataaaattgtcagcgtatttttacactattggctcaagaatgttataatgctaagggacataagttggcaaccacttggtttttggaaggactttcggtattgtattagaagtctgccctagctgttaaatttctgggtatttatcctaaggaattaattaaagagttaattgttcctttcttcagtgggccattgttttagatatttaaaaaatccaacagtttctatcataatgtaactgtaaaaatgtaaacacattattagcatggacttttaaataaagatttaaagaaagcaaaaaaaaaaaaaaaaaaaa

SEQ ID NO: 188 - DNA, 6906 bp, Homo sapiens
ggcgcgggcggcctggagccccgggagcggcgcgcgcggtcccggcccagccggctctcctggcctcgcgctgcacattctctcctggcggcggcgccacctgcagtagcgttcgcccgaacatggcgacacggagcagcaggagggagtcgcgactcccgttcctattcaccctggtcgcactgctgccgcccggagctctctgcgaagtctggacgcagaggctgcacggcggcagcgcgcccttgccccaggaccggggcttcctcgtggtgcagggcgacccgcgcgagctgcggctgtgggcgcgcggggatgccaggggggcgagccgcgcggacgagaagccgctccggaggaaacggagcgctgccctgcagcccgagcccatcaaggtgtacggacaggttagtctgaatgattcccacaatcagatggtggtgcactgggctggagagaaaagcaacgtgatcgtggccttggcccgagatagcctggcattggcgaggcccaagagcagtgatgtgtacgtgtcttacgactatggaaaatcattcaagaaaatttcagacaagttaaactttggcttgggaaataggagtgaagctgttatcgcccagttctaccacagccctgcggacaacaagcggtacatctttgcagacgcttatgcccagtacctctggatcacgtttgacttctgcaacactcttcaaggcttttccatcccatttcgggcagctgatctcctcctacacagtaaggcctccaaccttctcttgggctttgacaggtcccaccccaacaagcagctgtggaagtcagatgactttggccagacctggatcatgattcaggaacatgtcaagtccttttcttggggaattgatccctatgacaaaccaaataccatctacattgaacgacacgaaccctctggctactccactgtcttccgaagtacagatttcttccagtcccgggaaaaccaggaagtgatccttgaggaagtgagagattttcagcttcgggacaagtacatgtttgctacaaaggtggtgcatctcttgggcagtgaacagcagtcttctgtccagctctgggtctcctttggccggaagcccatgagagcagcccagtttgtcacaagacatcctattaatgaatattacatcgcagatgcctccgaggaccaggtgtttgtgtgtgtcagccacagtaacaaccgcaccaatttatacatctcagaggcagaggggctgaagttctccctgtccttggagaacgtgctctattacagcccaggaggggccggcagtgacaccttggtgaggtattttgcaaatgaaccatttgctgacttccaccgagtggaaggattgcaaggagtctacattgctactctgattaatggttctatgaatgaggagaacatgagatcggtcatcacctttgacaaagggggaacctgggagtttcttcaggctccagccttcacgggatatggagagaaaatcaattgtgagctttcccagggctgttcccttcatctggctcagcgcctcagtcagctcctcaacctccagctccggagaatgcccatcctgtccaaggagtcggctccaggcctcatcatcgccactggctcagtgggaaagaacttggctagcaagacaaacgtgtacatctctagcagtgctggagccaggtggcgagaggcacttcctggacctcactactacacatggggagaccacggcggaatcatcacggccattgcccagggcatggaaaccaacgagctaaaatacagtaccaatgaaggggagacctggaaaacattcatcttctctgagaagccagtgtttgtgtatggcctcctcacagaacctggggagaagagcactgtcttcaccatctttggctcgaacaaagagaatgtccacagctggctgatcctccaggtcaatgccacggatgccttgggagttccctgcacagagaatgactacaagctgtggtcaccatctgatgagcgggggaatgagtgtttgctgggacacaagactgttttcaaacggcggaccccccatgccacatgcttcaatggagaggactttgacaggccggtggtcgtgtccaactgctcctgcacccgggaggactatgagtgtgacttcggtttcaagatgagtgaagatttgtcattagaggtttgtgttccagatccggaattttctggaaagtcatactcccctcctgtgccttgccctgtgggttctacttacaggagaacgagaggctaccggaagatttctggggacacttgtagcggaggagatgttgaagcgcgactggaaggagagctggtcccctgtcccctggcagaagagaacgagttcattctgtatgctgtgaggaaatccatctaccgctatgacctggcctcgggagccaccgagcagttgcctctcaccgggctacgggcagcagtggccctggactttgactatgagcacaactgtttgtattggtccgacctggccttggacgtcatccagcgcctctgtttgaatggaagcacagggcaagaggtgatcatcaattctggcctggagacagtagaagctttggcttttgaacccctcagccagctgctttactgggtagatgcaggcttcaaaaagattgaggtagctaatccagatggcgacttccgactcacaatcgtcaattcctctgtgcttgatcgtcccagggctctggtcctcgtgccccaagagggggtgatgttctggacagactggggagacctgaagcctgggatttatcggagcaatatggatggttctgctgcctatcacctggtgtctgaggatgtgaagtggcccaatggcatctctgtggacgaccagtggatttactggacggatgcctacctggagtgcatagagcggatcacgttcagtggccagcagcgctctgtcattctggacaacctcccgcacccctatgccattgctgtctttaagaatgaaatctactgggatgactggtcacagctcagcatattccgagcttccaaatacagtgggtcccagatggagattctggcaaaccagctcacggggctcatggacatgaagattttctacaaggggaagaacactggaagcaatgcctgtgtgcccaggccatgcagcctgctgtgcctgcccaaggccaacaacagtagaagctgcaggtgtccagaggatgtgtccagcagtgtgcttccatcaggggacctgatgtgtgactgccctcagggctatcagctcaagaacaatacctgtgtcaaagaagagaacacctgtcttcgcaaccagtatcgctgcagcaacgggaactgtatcaacagcatttggtggtgtgactttgacaacgactgtggagacatgagcgatgagagaaactgccctaccaccatctgtgacctggacacccagtttcgttgccaggagtctgggacttgtatcccactgtcctataaatgtgaccttgaggatgactgtggagacaacagtgatgaaagtcattgtgaaatgcaccagtgccggagtgacgagtacaactgcagttccggcatgtgcatccgctcctcctgggtatgtgacggggacaacgactgcagggactggtctgatgaagccaactgtaccgccatctatcacacctgtgaggcctccaacttccagtgccgaaacgggcactgcatcccccagcggtgggcgtgtgacggggatacggactgccaggatggttccgatgaggatccagtcaactgtgagaagaagtgcaatggattccgctgcccaaacggcacttgcatcccatccagcaaacattgtgatggtctgcgtgattgctctgatggctccgatgaacagcactgcgagcccctctgtacgcacttcatggactttgtgtgtaagaaccgccagcagtgcctgttccactccatggtctgtgacggaatcatccagtgccgcgacgggtccgatgaggatgcggcgtttgcaggatgctcccaagatcctgagttccacaaggtatgtgatgagttcggtttccagtgtcagaatggagtgtgcatcagtttgatttggaagtgcgacgggatggatgattgcggcgattattctgatgaagccaactgcgaaaaccccacagaagccccaaactgctcccgctacttccagtttcggtgtgagaatggccactgcatccccaacagatggaaatgtgacagggagaacgactgtggggactggtctgatgagaaggattgtggagattcacatattcttcccttctcgactcctgggccctccacgtgtctgcccaattactaccgctgcagcagtgggacctgcgtgatggacacctgggtgtgcgacgggtaccgagattgtgcagatggctctgacgaggaagcctgccccttgcttgcaaacgtcactgctgcctccactcccacccaacttgggcgatgtgaccgatttgagttcgaatgccaccaaccgaagacgtgtattcccaactggaagcgctgtgacggccaccaagattgccaggatggccgggacgaggccaattgccccacacacagcaccttgacttgcatgagcagggagttccagtgcgaggacggggaggcctgcattgtgctctcggagcgctgcgacggcttcctggactgctcggacgagagcgatgaaaaggcctgcagtgatgagttgactgtgtacaaagtacagaatcttcagtggacagctgacttctctggggatgtgactttgacctggatgaggcccaaaaaaatgccctctgcttcttgtgtatataatgtctactacagggtggttggagagagcatatggaagactctggagacccacagcaataagacaaacactgtattaaaagtcttgaaaccagataccacgtatcaggttaaagtacaggttcagtgtctcagcaaggcacacaacaccaatgactttgtgaccctgaggaccccagagggattgccagatgcccctcgaaatctccagctgtcactccccagggaagcagaaggtgtgattgtaggccactgggctcctcccatccacacccatggcctcatccgtgagtacattgtagaatacagcaggagtggttccaagatgtgggcctcccagagggctgctagtaactttacagaaatcaagaacttattggtcaacactctatacaccgtcagagtggctgcggtgactagtcgtggaataggaaactggagcgattctaaatccattaccaccataaaaggaaaagtgatcccaccaccagatatccacattgacagctatggtgaaaattatctaagcttcaccctgaccatggagagtgatatcaaggtgaatggctatgtggtgaaccttttctgggcatttgacacccacaagcaagagaggagaactttgaacttccgaggaagcatattgtcacacaaagttggcaatctgacagctcatacatcctatgagatttctgcctgggccaagactgacttgggggatagccctctggcatttgagcatgttatgaccagaggggttcgcccacctgcacctagcctcaaggccaaagccatcaaccagactgcagtggaatgtacctggaccggcccccggaatgtggtttatggtattttctatgccacgtcctttcttgacctctatcgcaacccgaagagcttgactacttcactccacaacaagacggtcattgtcagtaaggatgagcagtatttgtttctggtccgtgtagtggtaccctaccaggggccatcctctgactacgttgtagtgaagatgatcccggacagcaggcttccaccccgtcacctgcatgtggttcatacgggcaaaacctccgtggtcatcaagtgggaatcaccgtatgactctcctgaccaggacttgttgtatgcaattgcagtcaaagatctcataagaaagactgacaggagctacaaagtaaaatcccgtaacagcactgtggaatacacccttaacaagttggagcctggcgggaaataccacatcattgtccaactggggaacatgagcaaagattccagcataaaaattaccacagtttcattatcagcacctgatgccttaaaaatcataacagaaaatgatcatgttcttctgttttggaaaagcctggctttaaaggaaaagcattttaatgaaagcaggggctatgagatacacatgtttgatagtgccatgaatatcacagcttaccttgggaatactactgacaatttctttaaaatttccaacctgaagatgggtcataattacacgttcaccgtccaagcaagatgcctttttggcaaccagatctgtggggagcctgccatcctgctgtacgatgagctggggtctggtgcagatgcatctgcaacgcaggctgccagatctacggatgttgctgctgtggtggtgcccatcttattcctgatactgctgagcctgggggtggggtttgccatcctgtacacgaagcaccggaggctgcagagcagcttcaccgccttcgccaacagccactacagctccaggctggggtccgcaatcttctcctctggggatgacctgggggaagatgatgaagatgcccctatgataactggattttcagatgacgtccccatggtgatagcctgaaagagctttcctcactagaaaccaaatggtgtaaatattttatttgataaagatagttgatggtttattttaaaagatgcactttgagttgcaatatgttatttttatatgggccaaaaacaaaaaacaaaaaaaaaaa

SEQ ID NO: 189 - DNA, 3824 bp, Homo sapiens
ggaagcgcagagcaggttcaaacacagacggcgggtgaacatggcgtcctcgacttggtctgagacgtgataggcctgccttctggttgaagatgtggcgagtgaaaaaactgagcctcagcctgtcgccttcgccccagacgggaaaaccatctatgagaactcctctccgtgaacttaccctgcagcccggtgccctcaccaactctggaaaaagatcccccgcttgctcctcgctgaccccatcactgtgcaagctggggctgcaggaaggcagcaacaactcatctccagtggattttgtaaataacaagaggacagacttatcttcagaacatttcagtcattcctcaaagtggctagaaacttgtcagcatgaatcagatgagcagcctctagatccaattccccaaattagctctactcctaaaacgtctgaggaagcagtagacccactgggcaattatatggttaaaaccatcgtccttgtaccatctccactggggcagcaacaagacatgatatttgaggcccgtttagataccatggcagagacaaacagcatatctttaaatggacctttgagaacagacgatctggtgagagaggaggtggcaccctgcatgggagacaggttttcagaagttgctgctgtatctgagaaacctatctttcaggaatctccgtcccatctcttagaggagtctccaccaaatccctgttctgaacaactacattgctccaaggaaagcctgagcagtagaactgaggctgtgcgtgaggacttagtaccttctgaaagtaacgccttcttgccttcctctgttctctggctttccccttcaactgccttggcagcagatttccgtgtcaatcatgtggacccagaggaggaaattgtagagcatggagctatggaggaaagagaaatgaggtttcccacacatcctaaggagtctgaaacagaagatcaagcacttgtctcaagtgtggaagatattctgtccacatgcctgacaccaaatctagtagaaatggaatcccaagaagctccaggcccagcagtagaagatgttggtaggattcttggctctgatacagagtcttggatgtccccactggcctggctggaaaaaggtgtaaatacctccgtcatgctggaaaatctccgccaaagcttatcccttccctcgatgcttcgggatgctgcaattggcactacccctttctctacttgctcggtggggacttggtttactccttcagcaccacaggaaaagagtacaaacacatcccagacaggcctggttggcaccaagcacagtacttctgagacagagcagctcctgtgtggccggcctccagatctgactgccttgtctcgacatgacttggaagataacctgctgagctctcttgtcattctggaggttctctcccgccagcttcgggactggaagagccagctggctgtccctcacccagaaacccaggacagtagcacacagactgacacatctcacagtgggataactaataaacttcagcatcttaaggagagccatgagatgggacaggccctacagcaggccagaaatgtcatgcaatcatgggtgcttatctctaaagagctgatatccttgcttcacctatccctgttgcatttagaagaagataagactactgtgagtcaggagtctcggcgtgcagaaacattggtctgttgctgttttgatttgctgaagaaattgagggcaaagctccagagcctcaaagcagaaagggaggaggcaaggcacagagaggaaatggctctcagaggcaaggatgcggcagagatagtgttggaggctttctgtgcacacgccagccagcgcatcagccagctggaacaggacctagcatccatgcgggaattcagaggccttctgaaggatgcccagacccaactggtagggcttcatgccaagcaagaagagctggttcagcagacagtgagtcttacttctaccttgcaacaagactggaggtccatgcaactggattatacaacatggacagctttgctgagtcggtcccgacaactcacagagaaactcacagtcaagagccagcaagccctgcaggaacgtgatgtggcaattgaggaaaagcaggaggtttctagggtgctggaacaagtctctgcccagttagaggagtgcaaaggccaaacagaacaactggagttggaaaacagtcgtctagcaacagatctccgggctcagttgcagattctggccaacatggacagccagctaaaagagctacagagtcagcatacccattgtgcccaggacctggctatgaaggatgagttactctgccagcttacccagagcaatgaggagcaggctgctcaatggcaaaaggaagagatggcactaaaacacatgcaggcagaactgcagcagcaacaagctgtcctggccaaagaggtgcgggacctgaaagagaccttggagtttgcagaccaggagaatcaggttgctcacctggagctgggtcaggttgagtgtcaattgaaaaccacactggaagtgctccgggagcgcagcttgcagtgtgagaacctcaaggacactgtagagaacctaacggctaaactggccagcaccatagcagataaccaggagcaagatctggagaaaacacggcagtactctcaaaagctagggctgctgactgagcaactacagagcctgactctctttctacagacaaaactaaaggagaagactgaacaagagacccttctgctgagtacagcctgtcctcccacccaggaacaccctctgcctaatgacaggaccttcctgggaagcatcttgacagcagtggcagatgaagagccagaatcaactcctgtgcccttgcttggaagtgacaagagtgctttcacccgagtagcatcaatggtttcccttcagcccgcagagaccccaggcatggaggagagcctggcagaaatgagtattatgactactgagcttcagagtctttgttccctgctacaagagtctaaagaagaagccatcaggactctgcagcgaaaaatttgtgagctgcaagctaggctgcaggcccaggaagaacagcatcaggaagtccagaaggcaaaagaagcagacatagagaagctgaaccaggccttgtgcttgcgctacaagaatgaaaaggagctccaggaagtgatacagcagcagaatgagaagatcctagaacagatagacaagagtggcgagctcataagccttagagaggaggtgacccaccttacccgctcacttcggcgtgcggagacagagaccaaagtgctccaggaggccctggcaggccagctggactccaactgccagcctatggccaccaattggatccaggagaaagtgtggctctctcaggaggtggacaaactgagagtgatgttcctggagatgaaaaatgagaaggaaaaactcatgatcaagttccagagccatagaaatatcctagaggagaaccttcggcgctctgacaaggagttagaaaaactagatgacattgttcagcatatttataagaccctgctctctattccagaggtggtgaggggatgcaaagaactacagggattgctggaatttctgagctaagaaactgaaagccagaatctgcttcacctctttttacctgcaatacccccttaccccaataccaagaccaactggcatagagccaactgagataaatgctatttaaataaagtgtatttaatgaatttctccaaaaaaaaaaaaaaaaaa

SEQ ID NO: 190 - DNA, 1373 bp, Homo sapiens
gtttgaaatcggaaagttggcggggctgcgggagctgagcctagagtccggctgttggctagagtgggcgcggatctggtgtggggaaggcggcgggactcaggcctgcctgcgaagcattgtcctacataatggtagaggacgaactggcacttttcgataaaagcataaatgaattttggaataaattcaaaagtacggacacctcctgtcagatggcgggactaagagatacctacaaggattccatcaaagcatttgcagaaaagctgtctgtgaaattaaaggaagaagaacgaatggttgagatgtttctggaatatcaaaatcagatcagcaggcaaaataagctcattcaagaaaaaaaggataacttgttaaaattgattgctgaagtaaaaggcaaaaagcaggaattggaagtactgactgcaaatatccaggatcttaaggaagaatattctaggaagaaggaaactatttctactgctaataaagcgaatgcagagaggttgaaaaggctgcagaaatctgcagacttgtataaagatcgacttggactagaaattcgaaaaatttatggtgagaaattgcagtttattttcactaatattgaccctaagaatcctgagagcccatttatgttttccttacatctcaatgaagcaagggactatgaagtgtcagatagtgcccctcatcttgagggcctagcagaatttcaagagaatgtaaggaagaccaacaatttttcagcttttcttgccaatgttcggaaagcttttactgccacggtttataattaacatacaaatagtgtatataaaaacggtttatttttcttctctattacatatctctttttttcttgtttttattattattatactttaagttttagggtacatgtgcacaatgtgcaggtttgttacatatgtatacatgtgccatattggtgtgctgcacccattaactcgtcatttcattaggtatatctcctaatgctatccctcccccctcccccaacccacaacagtccccgttgtgtgatgttccccttcctgtgtccatgtgttctcattgttcaattcccacctaggagtgagaatatgtggtgtttggttttttgtcctttcgatagtttgctgagaatgatggtttccagcttcatccatgttcctacaaaggacatgaactcatccttttttatggctgcatagtattccatggtgtatatgtgccacattttcttaatccagtctatcattgttggacatttgggttggttccaagtctttgctattgtgaatagtgccgaaataaacatacgtgtgcatgtgtctttaaaaaaaaaaaaaaaaaaaaaaaaaaaa

SEQ ID NO: 191 - DNA, 1330 bp, Homo sapiens
gcggacgcggggcgccagcaggtggcgctggacgcgcaacggacaaggaggcggggcctgcagctggcttggaggctccgcgctctggaggctcaggcgccgcgtggggcccgcacctctgggcagcagcggcagccgagactcacggtcaagctaaggcgaagagtgggtggctgaagccatactattttatagaattaatggaaagcagaaaagacatcacaaaccaagaagaactttggaaaatgaagcctaggagaaatttagaagaagacgattatttgcataaggacacgggagagaccagcatgctaaaaagacctgtgcttttgcatttgcaccaaacagcccatgctgatgaatttgactgcccttcagaacttcagcacacacaggaactctttccacagtggcacttgccaattaaaatagctgctattatagcatctctgacttttctttacactcttctgagggaagtaattcaccctttagcaacttcccatcaacaatatttttataaaattccaatcctggtcatcaacaaagtcttgccaatggtttccatcactctcttggcattggtttacctgccaggtgtgatagcagcaattgtccaacttcataatggaaccaagtataagaagtttccacattggttggataagtggatgttaacaagaaagcagtttgggcttctcagtttcttttttgctgtactgcatgcaatttatagtctgtcttacccaatgaggcgatcctacagatacaagttgctaaactgggcatatcaacaggtccaacaaaataaagaagatgcctggattgagcatgatgtttggagaatggagatttatgtgtctctgggaattgtgggattggcaatactggctctgttggctgtgacatctattccatctgtgagtgactctttgacatggagagaatttcactatattcagagcaagctaggaattgtttcccttctactgggcacaatacacgcattgatttttgcctggaataagtggatagatataaaacaatttgtatggtatacacctccaacttttatgatagctgttttccttccaattgttgtcctgatatttaaaagcatactattcctgccatgcttgaggaagaagatactgaagattagacatggttgggaagacgtcaccaaaattaacaaaactgagatatgttcccagttgtagaattactgtttacacacatttttgttcaatattgatatattttatcaccaacatttcaagtttgtatttgttaataaaatgattattcaaggaaaaaaaaaaaaaaaaaa

SEQ ID NO: 192 - DNA, 1730 bp, Homo sapiens
atcaccgggcgtccgctccggggtgccgtcgaggagacaatagggggcgtgggccctcgtttacctccctccctccctcccttccctgcgggccccgccgggttccccattgtctgaagggacggggcggtgccccagggaccagcggctttaggaccaaactgcgggcagccagggccgcgaccctccctgcgaccgtcccctggcgaccgcagctggtgattgaggggcggcgctcccgggccccacgagggttcttctgtcttcgcggccggacgcgcggacagcgtgggtggcggcaggactttccttatcccagttgattgtgcagaatacactgcctgtcgcttgtcttctattcaccatggcttcttctgatatccaggtgaaagaactggagaagcgtgcctcaggccaggcttttgagctgattctcagccctcggtcaaaagaatctgttccagaattccccctttcccctccaaagaagaaggatctttccctggaggaaattcagaagaaattagaagctgcagaagaaagacgcaagtcccatgaagctgaggtcttgaagcagctggctgagaaacgagagcacgagaaagaagtgcttcagaaggcaatagaagagaacaacaacttcagtaaaatggcagaagagaaactgacccacaaaatggaagctaataaagagaaccgagaggcacaaatggctgccaaactggaacgtttgcgagagaaggataagcacattgaagaagtgcggaagaacaaagaatccaaagaccctgctgacgagactgaagctgactaatttgttctgagaactgactttctccccatccccttcctaaatatccaaagactgtactggccagtgtcattttattttttccctcctgacaaatattttagaagctaatgtaggactgtataggtagatccagatccagactgtaagatgttgttttaggggctaaaggggagaaactgaaagtgttttactctttttctaaagtgttggtctttctaatgtagctatttttcttgttgcatcttttctacttcagtacacttggtgtactgggttaatggctagtactgtattggctctgtgaaaacatatttgtgaaaagagtatgtagtggcttcttttgaactgttagatgctgaatatctgttcacttttcaatcccaattctgtcccaatcttaccagatgctactggacttgaatggttaataaaactgcacagtgctgttggtggcagtgacttcttttgagttaggttaataaatcaagccatagagcccctcctggttgatacttgttccagatggggcctttggggctggtagaaatacccaacgcacaaatgaccgcacgttctctgccccgtttcttgccccagtgtggtttgcattgtctccttccacaatgactgctttgtttggatgcctcagcccaggtcagctgttactttctttcagatgtttatttgcaaacaaccattttttgttctgtgtcccttttaaaaggcagattaaaagcacaagcgtgtttctagagaacagttgagagagaatctcaagattctacttggtggtttgcttgctctacgttacaggtggggcatgtcctcatcctttcctgccataaaagctatgacacgagaatcagaatattaataaaactttatgtactgctgtagcaaaaaaaaaaaaaaaaaa

SEQ ID NO: 193 - DNA, 3524 bp, Homo sapiens
gtcatctgtggaggagaaaagtcacatccagctccttcatgttgctgccgatgtgggattttcctggcttcgtcagccaagcaattggctgcctttgccggaggctttgagaaccaaggcttgaaggccggcaggagcatccagggggaagcttggcttcagggaggacctagcagacgttgggccggagcactagcctcacggagaaggatctgaaagaagccaaggcgcggagccagcagattgcagcccagctgaccacccctcccagctccaattcccgtggcgtccagctcttcaacaggcgccggcagagggtgaacgagttcaccttggagagccacggccagaggggacagaagcccagccaggagtccctcagagtgctcccttcaagcctcccaggccatgcaccggggctcagcctgagttccacctcgctgccggagccaggccctccacggcaccccagtccccagagccccgacagaggggtccctggccacagcatggaggggtactcagaggaggctagcttgctgcggcacctggagaaggtggccagtgaggaggaagaggtaccactggtggtttatctaaaggagaatgcagcactgctgacagccaatgggctgcacctgtcccaaaaccgagaggcccagcagtcctcaccggccccacctccagctgaggtccacagcccagctgcagatgtcaaccaaaaccttgcctcgcccagtgccacgctcaccacaccaacttctaacagcagccacaatccgccagccaccgatgtcaatcagaacccaccggcaactgttgtcccacagagcctgccactttctagcatccaacagaattcctcagaggcccaactcccatctaatggcacagggcctgcttccaaacccagcaccctgtgtgctgatgggcaaccccaggcaccggctgaggaggtgagatgcagcacactcctaattgacaaggtatcaactccagctaccaccaccagcaccttctccagagaagctacgctcatccccagctccaggcccccagcctcagatttcatgtccagctccctgctcattgacatccagcccaacaccctagtggtgtcagcagatcaagagatgtctgggcgagcagctgccaccacgcccaccaaggtctacagtgaggtccacttcacactggccaagcccccatcagtggtcaacaggacggccaggccttttgggatccaggcgccagggggcaccagccagatggagaggagccccatgctagagagacgacattttggggagaaggccccggctccccagccccccagtttgccagacaggagcccccggccacagagacacataatgtcccgcagccccatggtggaaaggaggatgatggggcagcgaagcccggcctcagagagacgccccttggggaacttcactgcaccccccacctacactgagaccttgtccacagcccctctggcttcctgggtgaggtctcctccctcatattctgtcctgtatcccagctccgaccccaagtcttctcatctgaagggccaggcggttcctgccagcaagacgggcattctggaggagtcgatggcccgccggggcagccgcaaatccatgtttactttcgtggagaagcccaaggtgaccccgaatccagacttgctggatctggtacagacagcggatgagaagcggcggcagagggaccagggggaggtaggcgtggaggaggagcccttcgcactgggggccgaggcctccaacttccagcaggagccagcacctcgtgacagggccagccccgcggcggcggaggaggtggtaccagagtgggcctcctgcctcaagtcaccccgcatccaggccaagccgaagcccaaacccaaccagaacctctccgaggcctctgggaagggagctgagctctacgcccgccgccagtcacggatggagaaatatgtcatcgagtcttcaagccacacgccagagctggcccgctgcccatcacctaccatgtccctgccttcctcctggaaataccccactaacgcccccggggccttccgagtggcatcccgaagcccagcccggaccccgcctgcctccctctaccatggctacctgcctgagaacggggtcctgcgcccagagcccaccaagcagccgccataccagctgcgcccctcgctctttgtcctctcacctatcaaggagcctgccaaggtctcaccaagagctgcctcgcccgccaagcccagctccttggacctggtgcccaacctgcccaagggggctctccctccatctcctgccctgcctcggccctcgcgctcctcaccgggcctctacacctcccccggccaggacagcctgcagcccactgccgtgagccctccttacggcggtgacatctcccccgtgtctccctccagggcgtggtctccccgagccaagcaggcccccaggccctccttctctacccggaacgccgggatcgaggctcaggaccgccgggagagcctgcccacctccccaccctggacgccgggcgcgtcccggccccccagcagcctagacggctgggtgagcccgggcccgtgggagccaggtcgcgggagcagcatgagcagccccccgccgctgccgccgccaccgcccatgtctccctcgtggagcgagcgctcggtgtccccgctgcgacctgagaccgaggcgcggccccccagccgccagctgcaggcgcttctggcgcgaaacatcatcaatgcggcccggcgcaagagcgcctccccgcggtcggcgggcgccgagaacccgcggcccttctccccgccgagggcgccaccgcccccgcccccgcccccgcccccgcccccgcgcatgcgctcgccacagcccgcccgccccggctcggctgctgtgccgggggcagccttcgcgcccatcccgcggagcccgttgcccgccggtccttcgtcctgcaccagtccccggagcccgctgcccgcgcctcccaggcccttcctctaccgccgctcgcccacggactccgacgtgtccctcgactccgaggactccggggctaagtctccaggcatcctgggctacaatatctgtccccgcgggtggaatggcagccttcggctcaagcgtggcagcctccccgccgaggcctcctgcaccacctagagccccacccccgaccccaccccgggagggcagagccagaagaaggctcattagacctgggggacccaaagggtctggcctctttgggcagccccagagatgaggggtcagcagaggagagctctggggttggggatgggttagggacgcaagcttgagttctagcccttgctctcattcagctgttgtgtgaccctgggtaagacccttccttgtttgaccctcagctttcccatctgtttaatggtggctttggccaaggcaatccacaaacgtcaaaattccccttcccatcagtacaca

SEQ ID NO: 194 - DNA, 2788 bp, Homo sapiens
ggcggcggtagcagccaggcttggcccccggcgtggagcagacgcggacccctccttcctggcggcggcggcgcgggctcagagcccggcaacgggcgggcgggcagaatgagtctgcaggtcttaaacgacaaaaatgtcagcaatgaaaaaaatacagaaaattgcgacttcctgttttcgccaccagaagttaccggaagatcgtctgttcttcgtgtgtcacagaaagaaaatgtgccacccaagaacctggccaaagctatgaaggtgacttttcagacacctctgcgggatccacagacgcacaggattctaagtcctagcatggccagcaaacttgaggctcctttcactcaggatgacacccttggactggaaaactcacacccggtctggacacagaaagagaaccaacagctcatcaaggaagtggatgccaaaactactcatggaattctacagaaaccagtggaggctgacaccgacctcctgggggatgcaagcccagcctttgggagtggcagctccagcgagtctggcccaggtgccctggctgacctggactgctcaagctcttcccagagcccaggaagttctgagaaccaaatggtgtctccaggaaaagtgtctggcagccctgagcaagccgtggaggaaaaccttagttcctattccttagacagaagagtgacacccgcctctgagaccctagaagacccttgcaggacagagtcccagcacaaagcggagactccgcacggagccgaggaagaatgcaaagcggagactccgcacggagccgaggaggaatgccggcacggtggggtctgtgctcccgcagcagtggccacttcgcctcctggtgcaatccctaaggaagcctgcggaggagcacccctgcagggtctgcctggcgaagccctgggctgccctgcgggtgtgggcacccccgtgccagcagatggcactcagacccttacctgtgcacacacctctgctcctgagagcacagccccaaccaaccacctggtggctggcagggccatgaccctgagtcctcaggaagaagtggctgcaggccaaatggccagctcctcgaggagcggacctgtaaaactagaatttgatgtatctgatggcgccaccagcaaaagggcacccccaccaaggagactgggagagaggtccggcctcaagcctcccttgaggaaagcagcagtgaggcagcaaaaggccccgcaggaggtggaggaggacgacggtaggagcggagcaggagaggacccccccatgccagcttctcggggctcttaccacctcgactgggacaaaatggatgacccaaacttcatcccgttcggaggtgacaccaagtctggttgcagtgaggcccagcccccagaaagccctgagaccaggctgggccagccagcggctgaacagttgcatgctgggcctgccacggaggagccaggtccctgtctgagccagcagctgcattcagcctcagcggaggacacgcctgtggtgcagttggcagccgagaccccaacagcagagagcaaggagagagccttgaactctgccagcacctcgcttcccacaagctgtccaggcagtgagccagtgcccacccatcagcaggggcagcctgccttggagctgaaagaggagagcttcagagaccccgctgaggttctaggcacgggcgcggaggtggattacctggagcagtttggaacttcctcgtttaaggagtcggccttgaggaagcagtccttatacctcaagttcgaccccctcctgagggacagtcctggtagaccagtgcccgtggccaccgagaccagcagcatgcacggtgcaaatgagactccctcaggacgtccgcgggaagccaagcttgtggagttcgatttcttgggagcactggacattcctgtgccaggcccacccccaggtgttcccgcgcctgggggcccacccctgtccaccggacctatagtggacctgctccagtacagccagaaggacctggatgcagtggtaaaggcgacacaggaggagaaccgggagctgaggagcaggtgtgaggagctccacgggaagaacctggaactggggaagatcatggacaggttcgaagaggttgtgtaccaggccatggaggaagttcagaagcagaaggaactttccaaagctgaaatccagaaagttctaaaagaaaaagaccaacttaccacagatctgaactccatggagaagtccttctccgacctcttcaagcgttttgagaaacagaaagaggtgatcgagggctaccgcaagaacgaagagtcactgaagaagtgcgtggaggattacctggcaaggatcacccaggagggccagaggtaccaagccctgaaggcccacgcggaggagaagctgcagctggcaaacgaggagatcgcccaggtccggagcaaggcccaggcggaagcgttggccctccaggccagcctgaggaaggagcagatgcgcatccagtcgctggagaagacagtggagcagaagactaaagagaacgaggagctgaccaggatctgcgacgacctcatctccaagatggagaagatctgacctccacggagccgctgtccccgcccccctgctcccgtctgtctgtcctgtctgattctcttaggtgtcatgttcttttttctgtcttgtcttcaactttttttaaaactagattgctttgaaaacatgactcaataaaagtttcctttcaatttaaaaaaaa

SEQ ID NO: 195 - DNA, 6475 bp, Homo sapiens
ggcgaggcgaggtttgctggggtgaggcagcggcgcggccgggccgggccgggccacaggcggtggcggcgggaccatggaggcggcggtcgctgctccgcgtccccggctgctcctcctcgtgctggcggcggcggcggcggcggcggcggcgctgctcccgggggcgacggcgttacagtgtttctgccacctctgtacaaaagacaattttacttgtgtgacagatgggctctgctttgtctctgtcacagagaccacagacaaagttatacacaacagcatgtgtatagctgaaattgacttaattcctcgagataggccgtttgtatgtgcaccctcttcaaaaactgggtctgtgactacaacatattgctgcaatcaggaccattgcaataaaatagaacttccaactactgtaaagtcatcacctggccttggtcctgtggaactggcagctgtcattgctggaccagtgtgcttcgtctgcatctcactcatgttgatggtctatatctgccacaaccgcactgtcattcaccatcgagtgccaaatgaagaggacccttcattagatcgcccttttatttcagagggtactacgttgaaagacttaatttatgatatgacaacgtcaggttctggctcaggtttaccattgcttgttcagagaacaattgcgagaactattgtgttacaagaaagcattggcaaaggtcgatttggagaagtttggagaggaaagtggcggggagaagaagttgctgttaagatattctcctctagagaagaacgttcgtggttccgtgaggcagagatttatcaaactgtaatgttacgtcatgaaaacatcctgggatttatagcagcagacaataaagacaatggtacttggactcagctctggttggtgtcagattatcatgagcatggatccctttttgattacttaaacagatacacagttactgtggaaggaatgataaaacttgctctgtccacggcgagcggtcttgcccatcttcacatggagattgttggtacccaaggaaagccagccattgctcatagagatttgaaatcaaagaatatcttggtaaagaagaatggaacttgctgtattgcagacttaggactggcagtaagacatgattcagccacagataccattgatattgctccaaaccacagagtgggaacaaaaaggtacatggcccctgaagttctcgatgattccataaatatgaaacattttgaatccttcaaacgtgctgacatctatgcaatgggcttagtattctgggaaattgctcgacgatgttccattggtggaattcatgaagattaccaactgccttattatgatcttgtaccttctgacccatcagttgaagaaatgagaaaagttgtttgtgaacagaagttaaggccaaatatcccaaacagatggcagagctgtgaagccttgagagtaatggctaaaattatgagagaatgttggtatgccaatggagcagctaggcttacagcattgcggattaagaaaacattatcgcaactcagtcaacaggaaggcatcaaaatgtaattctacagctttgcctgaactctccttttttcttcagatctgctcctgggttttaatttgggaggtcaattgttctacctcactgagagggaacagaaggatattgcttccttttgcagcagtgtaataaagtcaattaaaaacttcccaggatttctttggacccaggaaacagccatgtgggtcctttctgtgcactatgaacgcttctttcccaggacagaaaatgtgtagtctacctttattttttattaacaaaacttgttttttaaaaagatgattgctggtcttaactttaggtaactctgctgtgctggagatcatctttaagggcaaaggagttggattgctgaattacaatgaaacatgtcttattactaaagaaagtgatttactcctggttagtacattctcagaggattctgaaccactagagtttccttgattcagactttgaatgtactgttctatagtttttcaggatcttaaaactaacacttataaaactcttatcttgagtctaaaaatgacctcatatagtagtgaggaacataattcatgcaattgtattttgtatactattattgttctttcacttattcagaacattacatgccttcaaaatgggattgtactataccagtaagtgccacttctgtgtctttctaatggaaatgagtagaattgctgaaagtctctatgttaaaacctatagtgtttgaattcaaaaagcttatttatctgggtaacccaaactttttctgttttgtttttggaagggtttttgtggtatgtcatttggtattctattctgaaaatgcctttctcctaccaaaatgtgcttaagccactaaagaaatgaagtggcattaattagtaaattattagcatggtcatgtttgaatattctcacatcaagcttttgcattttaattgtgttgtctaagtatacttttaaaaaatcaagtggcactctagatgcttatagtactttaatatttgtagcatacagactaatttttctaaaagggaaagtctgtctagctgcttgtgaaaagttatgtggtattctgtaagccatttttttctttatctgttcaaagacttattttttaagacatgaattacatttaaaattagaatatggttaatattaaataataggcctttttctaggaaggcgaaggtagttaataatttgaatagataacagatgtgcaagaaagtcacatttgttatgtatgtaggagtaaacgttcggtggatcctctgtctttgtaactgaggttagagctagtgtggttttgaggtctcactacactttgaggaaggcagcttttaattcagtgtttccttatgtgtgcgtacattgcaactgcttacatgtaatttatgtaatgcattcagtgcacccttgttacttgggagaggtggtagctaaagaacattctgagtataggtttttctccatttacagatgtctttggtcaaatattgaaagcaaacttgtcatggtcttcttacattaagttgaaactagcttataataactggtttttacttccaatgctatgaagtctctgcagggcttttacagttttcgaagtccttttatcactgtgatcttattctgaggggagaaaaaactatcatagctctgaggcaagacttcgactttatagtgctatcagttccccgatacagggtcagagtaacccatacagtattttggtcaggaagagaaagtggccatttacactgaatgagttgcattctgataatgtcttatctcttatacgtagaataaatttgaaagactatttgatcttaaaaccaaagtaattttagaatgagtgacatattacataggaatttagtgtcaatttcatgtgtttaaaaacatcatgggaaaaatgcttagaggttactattttgactacaaagttgagtttttttctgtagttaccataatttcattgaagcaaatgaatgagtttgagaggtttgtttttatagttgtgttgtattacttgtttaataataatctctaattctgtgatcaggtactttttttgtgggggttttttttttgtttttttttttttgttgttgtttttgggccatttctaagcctaccagatctgctttatgaaatccaggggaccaatgcattttatcactaaaactatttttatataattttaagaatataccaaaagttgtctgatttaaagttgtaatacatgatttctcactttcatgtaaggttatccacttttgctgaagatattttttattgaatcaaagattgagttacaattatacttttcttacctaagtggataaaatgtacttttgatgaatcagggaatttttttaaagttggagtttagttctaaattgactttacgtattactgcagttaattccttttttggctagggatggtttgataaaccacaattggctgatattgaaaatgaaagaaacttaaaaggtgggatggatcatgattactgtcgataactgcagataaatttgattagagtaataattttgtcatttaaaaacacagttgtttatactgcccatcctaggatgctcaccttccaagattcaacgtggctaaaacatcttctggtaaattgtgcgtccatattcattttgtcagtagccaggagaaatggggatgggggaaatacgacttagtgaggcatagacatccctggtccatcctttctgtctccagctgtttcttggaacctgctctcctgcttgctggtccctgacgcagagaccgttgcctcccccacagccgtttgactgaaggctgctctggagacctagagtaaaacggctgatggaagttgtgggacccacttccatttccttcagtcattagaggtggaagggaggggtctccaagtttggagattgagcagatgaggcttgggatgcccctgctttgacttcagccatggatgaggagtgggatggcagcaaggtggctcctgtggcagtggagttgtgccagaaacagtggccagttgtatcgcctataagacagggtaaggtctgaagagctgagcctgtaattctgctgtaataatgatagtgctcaagaagtgccttgagttggtgtacagtgccatggccatcaagaatcccagatttcaggttttattacaaaatgtaagtggtcacttggcgattttgtagtacatgcatgagttaccttttttctctatgtctgagaactgtcagattaaaacaagatggcaaagagatcgttagagtgcacaacaaaatcactatcccattagacacatcatcaaaagcttatttttattcttgcactggaagaatcgtaagtcaactgtttcttgaccatggcagtgttctggctccaaatggtagtgattccaaataatggttctgttaacactttggcagaaaatgccagctcagatattttgagatactaaggattatctttggacatgtactgcagcttcttgtctctgttttggattactggaatacccatgggccctctcaagagtgctggacttctaggacattaagatgattgtcagtacattaaacttttcaatcccattatgcaatcttgtttgtaaatgtaaacttctaaaaatatggttaataacattcaacctgtttattacaacttaaaaggaacttcagtgaatttgtttttattttttaacaagatttgtgaactgaatatcatgaaccatgttttgatacccctttttcacgttgtgccaacggaatagggtgtttgatatttcttcatatgttaaggagatgcttcaaaatgtcaattgctttaaacttaaattacctctcaagagaccaaggtacatttacctcattgtgtatataatgtttaatatttgtcagagcattctccaggtttgcagttttatttctataaagtatgggtattatgttgctcagttactcaaatggtactgtattgtttatatttgtaccccaaataacatcgtctgtactttctgttttctgtattgtatttgtgcaggattctttaggctttatcagtgtaatctctgccttttaagatatgtacagaaaatgtccatataaatttccattgaagtcgaatgatactgagaagcctgtaaagaggagaaaaaaacataagctgtgtttccccataagtttttttaaattgtatattgtatttgtagtaatattccaaaagaatgtaaataggaaatagaagagtgatgcttatgttaagtcctaacactacagtagaagaatggaagcagtgcaaataaattacatttttcccaagtgccagtggcatattttaaaataaagtgtatacgttggaatgagtcatgccatatgtagttgctgtagatggcaactagaacctttgagttacaagagtctttagaagttttctaaccctgcctagtgcaagttacaatattatagcgtgttcggggagtgccctcctgtctgcaggtgtgtctctgtgcctgggggcttttctccacatgcttaggggtgtgggtcttccattggggcatgatggacctgtctacaggtgatctctgttgcctttgggtcagcacatttgttagtctcctgggggtgaaaacttggcttacaagagaactggaaaaatgatgagatgtggtccccaaacccttgattgactctggggaggggctttgtgaataggattgctctcacattaaagatagttacttcaatttgaaggctggatttagggatttttttttttccttataacaaagacatcaccaggatatgaagcttttgttgaaagttggaaaaaaagtgaaattaaagacattcccagacaaa

SEQ ID NO: 196 - DNA, 4409 bp, Homo sapiens
tggcggaaaggctgcggccccgcgccagagggccggtggctcctccgggcttctgaggacccgcagggagcgggcctcatcatttctgtctcctgtttctccacttccttctctattggttggtccactgatgtatggacttgcacatgatgaactgtgaacttctagccacatgtagtgcccttgggtacttggagggagacacttaccataaggaaccagattgcttagagagcgtgaaggatctgatccgctatttgaggcatgaggatgagacacgagatgtgcggcagcagctgggggcagcccagatcctacagagcgaccttctgcccatcctcacccagcaccaccaggacaagcctctctttgatgctgttatcagactgatggtgaacttgacacaaccagccttgctctgttttggcaatctgcctaaggagcccagctttcggcaccattttttgcaggtgctaacttatttgcaggcctacaaagaggcctttgccagtgagaaggcttttggagtcctcagtgaaaccttgtatgagctgctgcagctgggctgggaggaacggcaggaggaagacaacttgctgattgaacggatcctactgctggtcagaaatattctccatgtcccagctgaccttgatcaggagaagaagattgatgatgacgccagtgcccatgaccagctcctctgggcgattcacctcagcggcctggatgacctgctcctctttctggccagctcgtctgctgaggagcaatggagcctacatgtgctagagattgtctcccttatgtttcgtgaccagaaccccgagcagctggcgggagtagggcagggacgcttagctcaggagcggagtgcagattttgcagaactggaggtattgcgccagcgagagatggcagaaaagaagactcgagccctccagcgaggcaacaggcattctcgatttgggggctcctatattgtccaggggttgaaatccattggggagagggacctcatctttcacaaaggccttcacaacctacgaaactacagttcagatttgggaaagcagccgaaaaaggtgcctaaacgtcgccaggccgcccgagagctgtccattcagcgccgttctgccctcaatgtgaggctcttcctcagagacttctgctctgagttcctggagaactgttacaaccggctcatgggatcagtaaaggatcacctgcttcgggagaaagctcagcagcatgatgagacctattatatgtgggccttggctttcttcatggccttcaaccgagctgcctccttccggccaggcctggtttctgagaccctcagtgtccgtaccttccacttcattgagcagaacctcaccaactactatgagatgatgctgactgaccgcaaggaagctgcctcctgggcacgccggatgcacttggctctgaaggcctatcaggagctgctggcaacagtgaatgagatggacttatctccagatgaggctgtgagggagagcagccgcatcatcaagaacaatattttctatgtgatggagtaccgagaactattcctggcactttttcgaaagtttgatgagagatgccagccccgctctttccttcgtgacctggtggagaccacccacctcttcctcaaaatgttggagcgattctgtcggagccgtgggaacctggtggtgcagaacaaacaaaagaagagaaggaagaagaagaagaaggtcctagaccaggccattgtttctggtaatgtcccatctagcccagaagaagtggaggctgtgtggccagccctggctgagcagctacagtgctgtgcccagaattctgagctcagcatggactccgtggttccctttgatgcggcctcagaggtgccagtggaggagcagcgggcagaagctatggtacggatccaagactgtctcctggctggccaggccccacaggccctgactctcctgaggtctgctcgggaggtgtggcctgaaggagatgtgtttggctctcaagacatttctccagaggaagagatccagttgctgaaacaaatcctctctgctccacttccccggcagcagggcccagaggaacgtggggcagaggaagaagaagaggaggaggaggaggaagaggaggagttgcaagtggtccaggtgtcggagaaagaatttaattttctggactacctgaaacgctttgcatgttcaactgtcgttcgagcctatgtgctgctactaaggagctaccagcagaatagtgcccacactaaccattgcattgtgaagatgctgcaccggctggcccatgacctcaaaatggaagccctactttttcagctgtcagtcttctgcctcttcaatcgtctgcttagtgaccctgctgctggagcctacaaagagctagtgacttttgccaaatacatcctgggcaaattttttgcactggctgcagtcaaccaaaaagcctttgtggagctgttgttctggaagaacacagctgtggttcgagagatgactgagggctatggctccctggatgacaggtcttccagtcgcagagcacctacatggagccccgaagaagaggctcatcttcaggagctgtacctcgccaataaggacgtggaagggcaggatgtggtggaagccatcttggcccacctgaatactgttcctcgaacacgcaagcagatcatccaccatctggtacagatgggactggctgacagtgtcaaggacttccaaaggaaaggaacccatattgtactgtggacgggggatcaggagttggagctgcagcggctttttgaggaattccgggactcagatgatgtcctgggtcatatcatgaagaatatcacagccaaacgctcacgggcccgaatagtggataaactcttggctctggggctggtggctgagcggcgggagctgtacaagaaacggcagaaaaagttggcatcctccatcttgccaaatggagcggagtccctgaaagatttttgccaggaagatctggaagaagaggaaaacctgcctgaggaagacagcgaagaggaagaagaagggggctcagaagcagaacaagtccagggtagcttagtcctttcaaatgaaaaccttggtcaaagcctgcatcaggaaggcttttctatcccgctcctatggctccagaactgcctgatccgagcagctgatgatcgggaagaggatggctgctcccaggccgttccattggtgccactcacagaggaaaatgaggaagccatggaaaacgaacagtttcagcagctgttgcgcaagctaggggttcggccccctgcctctgggcaggaaaccttctggcgaattccagccaagctgagtcctacccagctccggagggcagcagcttctttgagtcaaccagaggaggaacagaagctgcagccagagctgcagcctaaagtccctggagagcaaggctctgatgaggagcactgtaaagagcaccgagcacaagccctgagggccctcttgctagcccacaagaagaaagcgggcctggcatccccagaggaggaagacgctgttggtaaagagccgctgaaggcagcacccaagaaacgacaattgctggacagcgacgaggaacaggaagaagatgagggcaggaacagagcaccagagttgggagctccaggaatccaaaagaagaaacgataccagattgaggatgatgaggatgactgaagagctaagaagcctaggggtagagatagacacgtttttagatggtgcattcaagtcagagttggaagggtcatacaggacccagaagctcctcttactggacagagcagtagaatcccaggctctttcacggatttaggctgagaaacttcagcagcagtattggacttctctgctgtcagtctttgtttctcccagtttttatcggtatgccccagcagctctctggagatttagttctcttcttctaggaaccatttcttttggttattggagctccttagcaaataagaggagtgagtgaaatagagaaagcaccccggaccccttttattggtctgttcctttggctttctcttggaggtgggtcgcagcaccagatggggagctttatgacatgacaggcgggagttttgtaccacttttagaagataccagatgcctctgtcctcattttgtttcctatgatcatcctctagataccagatagaggcccattcctgcatttgagatagggttggaatatagtactctagatgatgaatgtgtttgctttgtgtttggtattaaacatgtaagattagaagttctcaaaaaaaaaaaaaaaaaaaaaaaaaaaaaaaaaaaaaaaaaaaaaaaaaaaaaaaa

SEQ ID NO: 197 - DNA, 1421 bp, Homo sapiens
acttactgcgggacggccttggagagtactcgggttcgtgaacttcccggaggcgcaatgagctgcattaacctgcccactgtgctgcccggctcccccagcaagacccgggggcagatccaggtgattctcgggccgatgttctcaggaaaaagcacagagttgatgagacgcgtccgtcgcttccagattgctcagtacaagtgcctggtgatcaagtatgccaaagacactcgctacagcagcagcttctgcacacatgaccggaacaccatggaggcgctgcccgcctgcctgctccgagacgtggcccaggaggccctgggcgtggctgtcataggcatcgacgaggggcagtttttccctgacatcatggagttctgcgaggccatggccaacgccgggaagaccgtaattgtggctgcactggatgggaccttccagaggaagccatttggggccatcctgaacctggtgccgctggccgagagcgtggtgaagctgacggcggtgtgcatggagtgcttccgggaagccgcctataccaagaggctcggcacagagaaggaggtcgaggtgattgggggagcagacaagtaccactccgtgtgtcggctctgctacttcaagaaggcctcaggccagcctgccgggccggacaacaaagagaactgcccagtgccaggaaagccaggggaagccgtggctgccaggaagctctttgccccacagcagattctgcaatgcagccctgccaactgagggacctgcaagggccgcccgctcccttcctgccactgccgcctactggacgctgccctgcatgctgcccagccactccaggaggaagtcgggaggcgtggagggtgaccacaccttggccttctgggaactctcctttgtgtggctgccccacctgccgcatgctccctcctctcctacccactggtctgcttaaagcttccctctcagctgctgggacgatcgcccaggctggagctggccccgcttggtggcctgggatctggcacactccctctccttggggtgagggacagagccccacgctgttgacatcagcctgcttcttcccctctgcggctttcactgctgagtttctgttctccctgggaagcctgtgccagcacctttgagccttggcccacactgaggcttaggcctctctgcctgggatgggctcccaccctcccctgaggatggcctggattcacgccctcttgtttccttttgggctcaaagcccttcctacctctggtgatggtttccacaggaacaacagcatctttcaccaagatgggtggcaccaaccttgctgggacttggatcccaggggcttatctcttcaagtgtggagagggcagggtccacgcctctgctgtagcttatgaaattaactaatt

SEQ ID NO: 198 - DNA, 4749 bp, Homo sapiens
acagagcgtgttgttagagctgtgctgagcgggtgtttgggttgttggctgctttcttccccctttctcacacacttgtatattattttgaggtggtgttcgcagagtttgaaaggagagagaattaaaaaaaaaagccgcaagcgtttcactcttttatttttataatccccttcaatttggggttaaaaaaaagacaagaaaacaggaaggaagagaaataaggaaatgagatgtggtaaaagaagctaaaaggtgccttttaaaagatcgttgctgtgaagtgaaaaaaatctccagagaaaccaaaaagcaccgccgagacctcttccgaaccaaaggagtttgtgtttgcttttagggaagaagaaagatcattcattcggaggaataacaaccaattaaaagacaaataaaaaaagtttggagtgggacgcagagcgagcgagaggagctgccggcgggcggtggggcgcggagcccgcactttcccggccgggtgagcggcggccgcggcgccgggctcggcgggtgcgcctcggcggagcgaacgtcggagcgttgccttgggagacgcgcgccggacaatgcccgcggcgggccagtgacgcccgcggggaatgcggagcggcccggcagccggcacccagccgccgccgcgcgttcctgccgcccgtgtcacgcgagacccggcgggggccgggaccgcccgagccgcccctcagaccgagccggccgcctccgctgccgcggccgcctcctcttcggggtcattaaagccaatgagccgcgcgcctctgccgagcgcagccaactaaatcggcttggatgattcgcgacctgagcaagatgtacccgcagaccagacacccggcaccgcatcagcctgctcaaccctttaaatttacaatttccgaatcctgtgatcggattaaggaagagtttcagtttttacaggctcaataccacagtctgaagctggaatgtgagaaactcgccagtgagaagacagagatgcagcggcattatgtcatgtattatgaaatgtcctatgggttgaatatagaaatgcacaagcaggcagagattgtcaagaggctgaatgctatctgtgcacaagtcattcctttcctgtcccaagagcaccagcaacaagtggtgcaggctgtggaacgggccaagcaggtgaccatggcagaactgaacgccatcattgggcaacaactccaggcccagcatttatcacatggacatggtctccccgtacctctgactccacacccttcagggctccagccccctgccattccacccatcggtagcagtgccgggcttctggccctctccagtgctctaggaggtcagtcccatcttccaattaaagatgagaagaagcaccatgacaatgatcaccaaagagacagagactccatcaagagctcttcagtatccccatcagccagtttccgaggtgctgagaagcacagaaactccgcagactactcctcagagagcaaaaagcagaaaactgaagaaaaggaaattgcagctcgttatgacagcgatggtgagaaaagtgatgacaacttggtggttgacgtttccaatgaggatccatcttcccctcgagggagcccagcacattcccccagagagaatggcctagacaagacacgcctgctcaagaaagatgccccgattagtccagcctctattgcatcttccagcagtactccctcctccaaatccaaagaacttagccttaatgaaaaatctactactcccgtctcaaagtccaatacccctactccacgaactgatgcgcccaccccaggcagtaactctactcccggattgaggcctgtacctggaaaaccaccaggagttgaccctttggcctcaagcctaaggaccccaatggcagtaccttgtccatatccaactccatttgggattgtgccccatgctggaatgaacggagagctgaccagccccggagcggcctacgctgggctccacaacatctcccctcagatgagcgcagctgctgccgccgccgctgctgctgctgcctatgggagatcaccagtggtgggatttgatccacaccatcacatgcgtgtgccagcaatacctccaaacctgacaggcattccaggaggaaaaccagcatactccttccatgttagcgcagatggtcagatgcagcctgtcccttttccacccgacgccctcatcggacctggaatcccccggcatgctcgccagatcaacaccctcaaccacggggaggtggtgtgcgcggtgaccatcagcaaccccacgagacacgtgtacacgggtgggaagggctgcgtcaaggtctgggacatcagccacccaggcaataagagtcctgtctcccagctcgactgtctgaacagggataactacatccgttcctgcagattgctccctgatggtcgcaccctaattgttggaggggaagccagtactttgtccatttgggacctggcggctccaaccccacgcatcaaggcagagctgacatcctcggcccccgcctgctatgccctggccatcagccccgattccaaggtctgcttctcatgctgcagcgacggcaacatcgctgtgtgggatctgcacaaccagaccttggtgaggcaattccagggccacacagatggagccagctgtattgacatttctaatgatggcaccaagctctggacaggtggtttggacaacacggtcaggtcctgggacctgcgcgaggggcggcagctgcagcagcacgacttcacctcccagatcttttctctgggctactgcccaactggagagtggcttgcagtggggatggagaacagcaatgtggaagttttgcatgtcaccaagccagacaaataccaactacatcttcatgagagctgtgtgctgtcgctcaagtttgcccattgtggcaaatggtttgtaagcactggaaaggacaaccttctgaatgcctggagaacaccttatggggccagtatattccagtccaaagaatcctcatcggtgcttagctgtgacatctccgtggacgacaaatacattgtcactggctctggggataagaaggccacagtttatgaagttatttattaaagacaaatcttcatgcagactggacttctcctcctggtagcactttgctctgtcatcctttttgttcacccccatccccgcatctaaaaccaaggatttcagatactcattgcagttgtggagtttaatcccctttcttaacctcacttcccacttgctattgaattgtgaatagtcattaaaaacctgtgataccaaatcttcagctgtctacttggaagaacatggaataagcatacttaacagtgaaaagaatctttaattatgtattatatctgtaatatatttattttgtttaaagaaggctttctaacaatgactgactaaataaagctgtctgctcctgcattgataatgaaggtgcgttgtatttgatacccctccccccctttttttggcaaaggaggggaaaggaaggtttaaaataattgatttaaaatgtcactaagtgtagactgatgactgtatagagatgtgaaatgtataattacacatggaagcaatatgttgctgtgttgttattaggttttttttgtttttgttttctacatcttttaaagacttttggaaatttggctgaacaattagaacacaacaggccaactcatactcatttggatctatttagacaacgttaaccaatatatctatagctttagattatattcgataaaagtaattggactttttttctttttttgactcgttgacaagtgtctttgtaatatgtttttagttccctttttttgttgtattataggcagatgaacaaattaaatttggcctcaaagagagaacttactcccttctggatatttttgccacatttctttgcaaaaggagatatatatatctttagtcagttttgttgttatgagaaattatgggttattttgtggcatgctctttgggagctgcacagttatggggaggactcccactgctgtgcaagttaagtcttttacaaaacaaggacagcagaggagggtttgcagagacctccctctgaaaaacacaaagaatggactctctcctgggatgaggacttgctttctttacctccggttctttccatgtcttagttggatgtccctgaaatggacacaggctgtgccattgtgccagaaacattgtgttatcttttatgttgttgttgttgctgttaaactataatatgtgacttctttttttattattttttgtttgaatgctttaaaaatcttttaagtctgtggatctgctgatgtacagtgcctttgctgctatggatcaaaatcaaaagaaccgtgtagatatactttattgtataagtagaaaattacttaatttcatactagaaatggatggatgctgcaagttgaaatggactgtccattgacgttcctaatgtggtagcagaaaaaaaaaaatggtgtcttaagtgcttagtgtttgatgtcattaacagtttcgtaaaactctacagtgtagaaagattttgatactaaactgtgcgttgtacatagttctaatgcattgtattgaccaccagtacttctataatggtagattgtttgtgaattcagacttttaagcattaaacataaataacttctagaa

SEQ ID NO: 199 - DNA, 5698 bp, Homo sapiens
aggttcaagtggagctctcctaaccgacgcgcgtctgtggagaagcggcttggtcgggggtggtctcgtggggtcctgcctgtttagtcgctttcagggttcttgagccccttcacgaccgtcaccatggaagtgtcaccattgcagcctgtaaatgaaaatatgcaagtcaacaaaataaagaaaaatgaagatgctaagaaaagactgtctgttgaaagaatctatcaaaagaaaacacaattggaacatattttgctccgcccagacacctacattggttctgtggaattagtgacccagcaaatgtgggtttacgatgaagatgttggcattaactatagggaagtcacttttgttcctggtttgtacaaaatctttgatgagattctagttaatgctgcggacaacaaacaaagggacccaaaaatgtcttgtattagagtcacaattgatccggaaaacaatttaattagtatatggaataatggaaaaggtattcctgttgttgaacacaaagttgaaaagatgtatgtcccagctctcatatttggacagctcctaacttctagtaactatgatgatgatgaaaagaaagtgacaggtggtcgaaatggctatggagccaaattgtgtaacatattcagtaccaaatttactgtggaaacagccagtagagaatacaagaaaatgttcaaacagacatggatggataatatgggaagagctggtgagatggaactcaagcccttcaatggagaagattatacatgtatcacctttcagcctgatttgtctaagtttaaaatgcaaagcctggacaaagatattgttgcactaatggtcagaagagcatatgatattgctggatccaccaaagatgtcaaagtctttcttaatggaaataaactgccagtaaaaggatttcgtagttatgtggacatgtatttgaaggacaagttggatgaaactggtaactccttgaaagtaatacatgaacaagtaaaccacaggtgggaagtgtgtttaactatgagtgaaaaaggctttcagcaaattagctttgtcaacagcattgctacatccaagggtggcagacatgttgattatgtagctgatcagattgtgactaaacttgttgatgttgtgaagaagaagaacaagggtggtgttgcagtaaaagcacatcaggtgaaaaatcacatgtggatttttgtaaatgccttaattgaaaacccaacctttgactctcagacaaaagaaaacatgactttacaacccaagagctttggatcaacatgccaattgagtgaaaaatttatcaaagctgccattggctgtggtattgtagaaagcatactaaactgggtgaagtttaaggcccaagtccagttaaacaagaagtgttcagctgtaaaacataatagaatcaagggaattcccaaactcgatgatgccaatgatgcagggggccgaaactccactgagtgtacgcttatcctgactgagggagattcagccaaaactttggctgtttcaggccttggtgtggttgggagagacaaatatggggttttccctcttagaggaaaaatactcaatgttcgagaagcttctcataagcagatcatggaaaatgctgagattaacaatatcatcaagattgtgggtcttcagtacaagaaaaactatgaagatgaagattcattgaagacgcttcgttatgggaagataatgattatgacagatcaggaccaagatggttcccacatcaaaggcttgctgattaattttatccatcacaactggccctctcttctgcgacatcgttttctggaggaatttatcactcccattgtaaaggtatctaaaaacaagcaagaaatggcattttacagccttcctgaatttgaagagtggaagagttctactccaaatcataaaaaatggaaagtcaaatattacaaaggtttgggcaccagcacatcaaaggaagctaaagaatactttgcagatatgaaaagacatcgtatccagttcaaatattctggtcctgaagatgatgctgctatcagcctggcctttagcaaaaaacagatagatgatcgaaaggaatggttaactaatttcatggaggatagaagacaacgaaagttacttgggcttcctgaggattacttgtatggacaaactaccacatatctgacatataatgacttcatcaacaaggaacttatcttgttctcaaattctgataacgagagatctatcccttctatggtggatggtttgaaaccaggtcagagaaaggttttgtttacttgcttcaaacggaatgacaagcgagaagtaaaggttgcccaattagctggatcagtggctgaaatgtcttcttatcatcatggtgagatgtcactaatgatgaccattatcaatttggctcagaattttgtgggtagcaataatctaaacctcttgcagcccattggtcagtttggtaccaggctacatggtggcaaggattctgctagtccacgatacatctttacaatgctcagctctttggctcgattgttatttccaccaaaagatgatcacacgttgaagtttttatatgatgacaaccagcgtgttgagcctgaatggtacattcctattattcccatggtgctgataaatggtgctgaaggaatcggtactgggtggtcctgcaaaatccccaactttgatgtgcgtgaaattgtaaataacatcaggcgtttgatggatggagaagaacctttgccaatgcttccaagttacaagaacttcaagggtactattgaagaactggctccaaatcaatatgtgattagtggtgaagtagctattcttaattctacaaccattgaaatctcagagcttcccgtcagaacatggacccagacatacaaagaacaagttctagaacccatgttgaatggcaccgagaagacacctcctctcataacagactatagggaataccatacagataccactgtgaaatttgttgtgaagatgactgaagaaaaactggcagaggcagagagagttggactacacaaagtcttcaaactccaaactagtctcacatgcaactctatggtgctttttgaccacgtaggctgtttaaagaaatatgacacggtgttggatattctaagagacttttttgaactcagacttaaatattatggattaagaaaagaatggctcctaggaatgcttggtgctgaatctgctaaactgaataatcaggctcgctttatcttagagaaaatagatggcaaaataatcattgaaaataagcctaagaaagaattaattaaagttctgattcagaggggatatgattcggatcctgtgaaggcctggaaagaagcccagcaaaaggttccagatgaagaagaaaatgaagagagtgacaacgaaaaggaaactgaaaagagtgactccgtaacagattctggaccaaccttcaactatcttcttgatatgcccctttggtatttaaccaaggaaaagaaagatgaactctgcaggctaagaaatgaaaaagaacaagagctggacacattaaaaagaaagagtccatcagatttgtggaaagaagacttggctacatttattgaagaattggaggctgttgaagccaaggaaaaacaagatgaacaagtcggacttcctgggaaaggggggaaggccaaggggaaaaaaacacaaatggctgaagttttgccttctccgcgtggtcaaagagtcattccacgaataaccatagaaatgaaagcagaggcagaaaagaaaaataaaaagaaaattaagaatgaaaatactgaaggaagccctcaagaagatggtgtggaactagaaggcctaaaacaaagattagaaaagaaacagaaaagagaaccaggtacaaagacaaagaaacaaactacattggcatttaagccaatcaaaaaaggaaagaagagaaatccctggtctgattcagaatcagataggagcagtgacgaaagtaattttgatgtccctccacgagaaacagagccacggagagcagcaacaaaaacaaaattcacaatggatttggattcagatgaagatttctcagattttgatgaaaaaactgatgatgaagattttgtcccatcagatgctagtccacctaagaccaaaacttccccaaaacttagtaacaaagaactgaaaccacagaaaagtgtcgtgtcagaccttgaagctgatgatgttaagggcagtgtaccactgtcttcaagccctcctgctacacatttcccagatgaaactgaaattacaaacccagttcctaaaaagaatgtgacagtgaagaagacagcagcaaaaagtcagtcttccacctccactaccggtgccaaaaaaagggctgccccaaaaggaactaaaagggatccagctttgaattctggtgtctctcaaaagcctgatcctgccaaaaccaagaatcgccgcaaaaggaagccatccacttctgatgattctgactctaattttgagaaaattgtttcgaaagcagtcacaagcaagaaatccaagggggagagtgatgacttccatatggactttgactcagctgtggctcctcgggcaaaatctgtacgggcaaagaaacctataaagtacctggaagagtcagatgaagatgatctgttttaaaatgtgaggcgattattttaagtaattatcttaccaagcccaagactggttttaaagttacctgaagctcttaacttcctcccctctgaatttagtttggggaaggtgtttttagtacaagacatcaaagtgaagtaaagcccaagtgttctttagctttttataatactgtctaaatagtgaccatctcatgggcattgttttcttctctgctttgtctgtgttttgagtctgctttcttttgtctttaaaacctgatttttaagttcttctgaactgtagaaatagctatctgatcacttcagcgtaaagcagtgtgtttattaaccatccactaagctaaaactagagcagtttgatttaaaagtgtcactcttcctccttttctactttcagtagatatgagatagagcataattatctgttttatcttagttttatacataatttaccatcagatagaactttatggttctagtacagatactctactacactcagcctcttatgtgccaagtttttctttaagcaatgagaaattgctcatgttcttcatcttctcaaatcatcagaggccaaagaaaaacactttggctgtgtctataacttgacacagtcaatagaatgaagaaaattagagtagttatgtgattatttcagctcttgacctgtcccctctggctgcctctgagtctgaatctcccaaagagagaaaccaatttctaagaggactggattgcagaagactcggggacaacatttgatccaagatcttaaatgttatattgataaccatgctcagcaatgagctattagattcattttgggaaatctccataatttcaatttgtaaactttgttaagacctgtctacattgttatatgtgtgtgacttgagtaatgttatcaacgtttttgtaaatatttactatgtttttctattagctaaattccaacaattttgtactttaataaa

SEQ ID NO: 200 - DNA, 5261 bp, Homo sapiens
ggcgcccgaccccagccaccgccctgcggccagcgcgtcccccgactcgccgcccggagaccccgaggctccaacgagttcagaaatgtccagaaatgacaaagaaccgttttttgtgaagtttttaaagtcttcagacaattccaaatgtttttttaaagctctcgagtccataaaagaattccaatcagaagaatatcttcagattattacagaagaagaggcattgaagataaaggagaatgatagatcactttatatctgtgacccttttagtggcgttgtctttgatcacctcaaaaagcttggctgcagaattgttggtcctcaagtagtcatattttgtatgcaccaccagcgatgtgtcccaagagccgaacatccagtttataatatggttatgtctgatgtaaccatatcttgtacaagtctggaaaaagaaaaaagggaagaagttcataaatatgtacaaatgatgggcggacgagtatacagagaccttaatgtatcagtaactcaccttattgcaggagaagttggtagcaaaaaatatttagttgctgcaaacctgaagaaacctattttgcttccctcttggataaaaacactttgggagaagtcacaagagaaaaaaataactagatatactgatataaacatggaagatttcaagtgtcctatttttcttggttgcataatctgtgtgactggcttatgtggcttagacaggaaagaagttcagcaactcacagttaagcatggaggtcaatacatgggacaattgaaaatgaatgaatgtacacacctcattgtgcaagaaccaaaaggtcagaagtatgagtgtgccaagagatggaatgtacactgtgtgaccacacagtggttttttgacagtattgagaaaggtttttgtcaggatgaatccatatacaagacagaacctagaccagaagcaaagactatgcccaattcttcaactcctaccagccagatcaacacaattgatagtcgtactctttcagatgtcagcaatatttccaacataaatgcaagttgcgtaagtgaatcaatatgtaattcacttaacagcaaactggagcctacacttgaaaatctagaaaatctggatgtcagtgcatttcaagcacctgaagatttattagatggttgtcggatatatctttgcggttttagtggcagaaagctagataaactgagaagacttattaacagtggaggtggagttcgttttaaccagctaaatgaagatgtaactcatgttattgtgggagattatgatgatgaattgaagcagttttggaataaatcagcccacaggcctcatgtagtgggagcaaagtggttgctagagtgtttcagtaaaggttatatgctttctgaagaaccatatatccatgctaattaccagccagtggaaattccagtttcacatcagcctgaaagtaaagcagctcttttaaaaaagaagaacagcagcttctctaagaaagactttgctcctagtgaaaagcatgagcaagctgatgaagatctgctctctcaatatgaaaatggtagctccacagtagttgaggctaagacgtctgaagccaggccctttaatgattctactcatgctgagcccttgaatgattctactcacatttctttgcaagaagaaaaccagtcttctgtcagtcattgtgtccctgatgtttctacaattactgaagaaggcttatttagccaaaagagtttccttgttttgggttttagtaatgaaaatgaatctaacatcgcaaacatcataaaagaaaatgctgggaaaatcatgtcccttctgagcagaactgttgcggattatgctgtggttcctctgctggggtgtgaagtggaagccactgtgggagaagttgttacaaatacatggctggttacttgcatagactatcagactttgtttgatccaaagtcgaatcctctcttcacaccagttccagtaatgacaggaatgactcctttagaggattgtgttatttcatttagccagtgtgctggagcagaaaaagagtctttaacattcctagcaaacctccttggagcaagtgttcaagaatactttgttcgcaaatccaatgcaaagaaaggcatgtttgccagtactcatcttatactgaaagaacgtggtggctctaaatatgaagctgcaaagaagtggaatttacctgccgttactatagcttggctgttggagactgctagaacgggaaagagagcagacgaaagccattttctgattgaaaattcaactaaagaagaacgaagtttggaaacagaaataacaaatggaatcaatctaaattcagatactgcagagcatcctggcacacgcctgcaaactcacagaaaaaccgtcgttacacctttagatatgaaccgctttcagagtaaagctttccgtgctgtggtctcacaacatgccagacaggtcgcagcctccccagcagtaggacaaccacttcagaaggagccctcgttacacctggatacaccatcaaaattcctgtccaaggacaaactcttcaagccttcctttgatgtgaaggatgcacttgcagccttggaaactccaggacgtcccagccaacagaaaaggaaaccgagtacgccactctcagaagttattgtcaaaaacttgcaacttgctttggcaaatagctctcgaaatgctgtcgctctttctgccagccctcaactgaaagaggcccagtcagagaaggaagaagccccaaagccacttcacaaagtagtggtatgtgttagtaaaaaactcagtaagaagcagagtgaactaaatgggatcgcagcctctctaggagcagattacaggtggagttttgatgaaacagtgactcatttcatctatcaagggcggccaaatgacactaatcgggagtataaatctgtaaaagaaagaggagtacacattgtttccgagcactggcttttagattgtgcccaagagtgtaaacatcttcctgaatctctttatccacatacttataatcccaaaatgagcttggatatcagcgcagtgcaagatggccggctctgtaatagtcgactactctcagctgtgtcttcaacaaaggatgatgagccagatcctttgattttagaagaaaatgatgtagacaatatggccaccaataataaagagtcagcaccatcaaatggaagtggaaagaatgactctaaaggagttctgacacagaccttagagatgagagagaactttcagaagcagttacaggagataatgtctgcaacatcaatagtgaaaccccaagggcagaggacttccctttcaagaagtggttgtaacagcgcatcttcaacccctgacagcactcgctctgctcgcagtggacgaagtagagtcctagaggcactgaggcagtctcgtcagacagtacctgatgtcaacacagagccttcccaaaatgaacagatcatttgggatgaccctacagcaagggaggagagagcaaggcttgccagcaatttgcagtggcctagttgtcccacacaatactctgagcttcaggttgacattcaaaacttggaggattctccttttcaaaagcctttacatgattcagaaattgctaaacaggctgtctgtgatcctggaaacatacgtgtgactgaagctcccaaacacccaatctctgaagaactggaaactcccataaaagacagccacctgatccctacgcctcaagcccccagtattgcctttccactcgccaacccccctgtggctccgcaccctagagaaaagattataacgatagaggagactcatgaagaattaaaaaaacagtacatatttcagttatcatctctgaatcctcaagaacgtattgactattgtcatctgattgagaaactaggtggattggtgatagaaaagcagtgctttgatcccacctgtacacacattgttgtgggacatccacttcgaaacgagaagtatttagcctcagtggcagctgggaagtgggtgcttcatcgctcctaccttgaagcctgcaggactgctggacacttcgtgcaggaagaagactatgaatggggaagtagttccatacttgatgttttgactggaatcaatgtacagcaacgaagactagcacttgcagcaatgagatggagaaaaaaaatccagcaaagacaagaatctggcattgttgagggagcatttagtgggtggaaggttattttacatgtggatcagtctcgagaagcaggcttcaaacgccttcttcagtcaggaggagcaaaggtgctacctggtcattctgtacctttatttaaagaggccacacatcttttttctgacttgaataaactgaaaccagatgactcaggagttaatatagcagaagctgctgcccagaacgtgtactgcttgagaacagaatacattgctgattatctcatgcaggaatcacctcctcatgtagaaaattactgtctaccagaagctatttcatttattcagaataataaggaacttgggactggattatcacaaaagaggaaagctcctacagaaaaaaataaaatcaaacgacctagagtacactaatcgcatctaccctttagttaccaaacattaaatgtttttaaaaattgaaagcctgaatgtgactgtgatagatttgggtagtaatttaaagatgagtacctgaagaattctgcttcagagtataatgatgacccttcttgagttttgaacacctgaaattgtaatcactgaaatattaactgtttcttaataaaaagttacctgaaataacaacaaaatacaactcctcagctagcttgctgttaaaccacattgaagtctgttaaaagatatttatttttcttgtaaatatctgaagctgtagcttagtggaaattttagcaaggtaatggattttgctttaaaatgtctgccttacaaattcataacaacaagatttgtcagtcagcatttattcatgttttccctgatttttatcttctcaccattttacctcttttaacaggagcctgagcacaaggtttaatgaggaagctggggctataaatatgtgtgtatatatgtatatgtatgtttgtacaaatctccatgatgtttgccaagtttgaatgcgcaaaacttggaaaatgtgacaataaagaataaaagtagtaactcaaattagtat

SEQ ID NO: 201 - DNA, 3685 bp, Homo sapiens
agtggactcacgcaggcgcaggagactacacttcccaggaactccgggccgcgttgttcgctggtacctccttctgacttccggtattgctgcggtctgtagggccaatcgggagcctggaattgctttcccggcgctctgattggtgcattcgactaggctgcctgggttcaaaatttcaacgatactgaatgagtcccgcggcgggttggctcgcgcttcgttgtcagatctgaggcgaggctaggtgagccgtgggaagaaaagagggagcagctagggcgcgggtctccctcctcccggagtttggaacggctgaagttcaccttccagcccctagcgccgttcgcgccgctaggcctggcttctgaggcggttgcggtgctcggtcgccgcctaggcggggcagggtgcgagcaggggcttcgggccacgcttctcttggcgacaggattttgctgtgaagtccgtccgggaaacggaggaaaaaaagagttgcgggaggctgtcggctaataacggttcttgatacatatttgccagacttcaagatttcagaaaaggggtgaaagagaagattgcaactttgagtcagacctgtaggcctgatagactgattaaaccacagaaggtgacctgctgagaaaagtggtacaaatactgggaaaaacctgctcttctgcgttaagtgggagacaatgtcacaagttaaaagctcttattcctatgatgccccctcggatttcatcaatttttcatccttggatgatgaaggagatactcaaaacatagattcatggtttgaggagaaggccaatttggagaataagttactggggaagaatggaactggagggctttttcagggcaaaactcctttgagaaaggctaatcttcagcaagctattgtcacacctttgaaaccagttgacaacacttactacaaagaggcagaaaaagaaaatcttgtggaacaatccattccgtcaaatgcttgttcttccctggaagttgaggcagccatatcaagaaaaactccagcccagcctcagagaagatctcttaggctttctgctcagaaggatttggaacagaaagaaaagcatcatgtaaaaatgaaagccaagagatgtgccactcctgtaatcatcgatgaaattctaccctctaagaaaatgaaagtttctaacaacaaaaagaagccagaggaagaaggcagtgctcatcaagatactgctgaaaagaatgcatcttccccagagaaagccaagggtagacatactgtgccttgtatgccacctgcaaagcagaagtttctaaaaagtactgaggagcaagagctggagaagagtatgaaaatgcagcaagaggtggtggagatgcggaaaaagaatgaagaattcaagaaacttgctctggctggaatagggcaacctgtgaagaaatcagtgagccaggtcaccaaatcagttgacttccacttccgcacagatgagcgaatcaaacaacatcctaagaaccaggaggaatataaggaagtgaactttacatctgaactacgaaagcatccttcatctcctgcccgagtgactaagggatgtaccattgttaagcctttcaacctgtcccaaggaaagaaaagaacatttgatgaaacagtttctacatatgtgccccttgcacagcaagttgaagacttccataaacgaacccctaacagatatcatttgaggagcaagaaggatgatattaacctgttaccctccaaatcttctgtgaccaagatttgcagagacccacagactcctgtactgcaaaccaaacaccgtgcacgggctgtgacctgcaaaagtacagcagagctggaggctgaggagctcgagaaattgcaacaatacaaattcaaagcacgtgaacttgatcccagaatacttgaaggtgggcccatcttgcccaagaaaccacctgtgaaaccacccaccgagcctattggctttgatttggaaattgagaaaagaatccaggagcgagaatcaaagaagaaaacagaggatgaacactttgaatttcattccagaccttgccctactaagattttggaagatgttgtgggtgttcctgaaaagaaggtacttccaatcaccgtccccaagtcaccagcctttgcattgaagaacagaattcgaatgcccaccaaagaagatgaggaagaggacgaaccggtagtgataaaagctcaacctgtgccacattatggggtgccttttaagccccaaatcccagaggcaagaactgtggaaatatgccctttctcgtttgattctcgagacaaagaacgtcagttacagaaggagaagaaaataaaagaactgcagaaaggggaggtgcccaagttcaaggcacttcccttgcctcattttgacaccattaacctgccagagaagaaggtaaagaatgtgacccagattgaacctttctgcttggagactgacagaagaggtgctctgaaggcacagacttggaagcaccagctggaagaagaactgagacagcagaaagaagcagcttgtttcaaggctcgtccaaacaccgtcatctctcaggagccctttgttcccaagaaagagaagaaatcagttgctgagggcctttctggttctctagttcaggaaccttttcagctggctactgagaagagagccaaagagcggcaggagctggagaagagaatggctgaggtagaagcccagaaagcccagcagttggaggaggccagactacaggaggaagagcagaaaaaagaggagctggccaggctacggagagaactggtgcataaggcaaatccaatacgcaagtaccagggtctggagataaagtcaagtgaccagcctctgactgtgcctgtatctcccaaattctccactcgattccactgctaaactcagctgtgagctgcggataccgcccggcaatgggacctgctcttaacctcaaacctaggaccgtcttgctttgtcattgggcatggagagaacccatttctccagacttttacctacccgtgcctgagaaagcatacttgacaactgtggactccagttttgttgagaattgttttcttacattactaaggctaataatgagatgtaactcatgaatgtctcgattagactccatgtagttacttcctttaaaccatcagccggccttttatatgggtcttcactctgactagaatttagtctctgtgtcagcacagtgtaatctctattgctattgccccttacgactctcaccctctccccactttttttaaaaattttaaccagaaaataaagatagttaaatcctaagatagagattaagtcatggtttaaatgaggaacaatcagtaaatcagattctgtcctcttctctgcataccgtgaatttatagttaaggatccctttgctgtgagggtagaaaacctcaccaactgcaccagtgaggaagaagactgcgtggattcatggggagcctcacagcagccacgcagcaggctctgggtggggctgccgttaaggcacgttctttccttactggtgctgataacaacagggaaccgtgcagtgtgcattttaagacctggcctggaataaatacgttttgtctttccctcaaaaaaaaaaaaaaaaaaaaaaa

SEQ ID NO: 202 - DNA, 2469 bp, Homo sapiens
gacagagcaagactctgtctcaaaaaaaaaaaaaaaaagagcaaattttttttccaaggtgatagggagagtccgtggctgatgtctgcactgaccagacgcccctagggggccagcgagggcgggtcccaggtgcagcggatgcagaggagagaggcccgggcgcggcgcgggggatggtgcgatcccgggcccgagggcatcagacggcggctgattagctccggtttgcatcacccggaccgggggattagctccggtttgcatcacccggaccgggggattagctccggtttgcatcacccggaccgggggccgggcgcgcacgagactcgcagcggaagtggaggcggctccgcgcgcgtccgctgctaggacccgggcagggctggagctgggctgggatcccgagctcggcagcagcgcagcgggccggcccacctgctggtgccctggaggctctgagccccggcggcgcccgggcccacgcggaacgacggggcgagatgcgagccacccctctggctgctcctgcgggttccctgtccaggaagaagcggttggagttggatgacaacttagataccgagcgtcccgtccagaaacgagctcgaagtgggccccagcccagactgcccccctgcctgttgcccctgagcccacctactgctccagatcgtgcaactgctgtggccactgcctcccgtcttgggccctatgtcctcctggagcccgaggagggcgggcgggcctaccaggccctgcactgccctacaggcactgagtatacctgcaaggtgtaccccgtccaggaagccctggccgtgctggagccctatgcgcggctgcccccgcacaagcatgtggctcggcccactgaggtcctggctggtacccagctcctctacgcctttttcactcggacccatggggacatgcacagcctggtgcgaagccgccaccgtatccctgagcctgaggctgccgtgctcttccgccagatggccaccgccctggcgcactgtcaccagcacggtctggtcctgcgtgatctcaagctgtgtcgctttgtcttcgctgaccgtgagaggaagaagctggtgctggagaacctggaggactcctgcgtgctgactgggccagatgattccctgtgggacaagcacgcgtgcccagcctacgtgggacctgagatactcagctcacgggcctcatactcgggcaaggcagccgatgtctggagcctgggcgtggcgctcttcaccatgctggccggccactaccccttccaggactcggagcctgtcctgctcttcggcaagatccgccgcggggcctacgccttgcctgcaggcctctcggcccctgcccgctgtctggttcgctgcctccttcgtcgggagccagctgaacggctcacagccacaggcatcctcctgcacccctggctgcgacaggacccgatgcccttagccccaacccgatcccatctctgggaggctgcccaggtggtccctgatggactggggctggacgaagccagggaagaggagggagacagagaagtggttctgtatggctaggaccaccctactacacgctcagctgccaacagtggattgagtttgggggtagctccaagccttctcctgcctctgaactgagccaaaccttcagtgccttccagaagggagaaaggcagaagcctgtgtggagtgtgctgtgtacacatctgctttgttccacacacatgcagttcctgcttgggtgcttatcaggtgccaagccctgttctcggtgctgggagtacagcagtgagcaaaggagacaatattccctgctcacagagatgacaaactggcatccttgagctgacaacacttttccatgaccataggtcactgtctacactgggtacactttgtaccagtgtcggcctccactgatgctggtgctcaggcacctctgtccaaggacaatccctttcacaaacaaaccagctgcctttgtatcttgtaccttttcagagaaagggaggtatccctgtgccaaaggctccaggcctctcccctgcaactcaggacccaagcccagctcactctgggaactgtgttcccagcatctctgtcctcttgattaagagattctccttccaggcctaagcctgggatttgggccagagataagaatccaaactatgaggctagttcttgtctaactcaagactgttctggaatgagggtccaggcctgtcaaccatggggcttctgacctgagcaccaaggttgagggacaggattaggcagggtctgtcctgtggccacctggaaagtcccaggtgggactcttctggggacacttggggtccacaatcccaggtccatactctaggttttggataccatgagtatgtatgtttacctgtgcctaataaaggagaattatgaaataaaaaaaaaaaaaaaaaaa

SEQ ID NO: 203 - DNA, 2372 bp, Homo sapiens
cgaagctagggcggggcccgcgggctgaggcagcggctgtggcggcgacgctgggcgtgaggtggcggcggccgcgccctggttgggtccccactgctctcgggggcgccatggacgaggccgtgggcgacctgaagcaggcgcttccctgtgtggccgagtcgccaacggtccacgtggaggtgcatcagcgcggcagcagcactgcaaagaaagaagacataaacctgagtgttagaaagctactcaacagacataatattgtgtttggtgattacacatggactgagtttgatgaaccttttttgaccagaaatgtgcagtctgtgtctattattgacacagaattaaaggttaaagactcacagcccatcgatttgagtgcatgcactgttgcacttcacattttccagctgaatgaagatggccccagcagtgaaaatctggaggaagagacagaaaacataattgcagcaaatcactgggttctacctgcagctgaattccatgggctttgggacagcttggtatacgatgtggaagtcaaatcccatctcctcgattatgtgatgacaactttactgttttcagacaagaacgtcaacagcaacctcatcacctggaaccgggtggtgctgctccacggtcctcctggcactggaaaaacatccctgtgtaaagcgttagcccagaaattgacaattagactttcaagcaggtaccgatatggccaattaattgaaataaacagccacagcctcttttctaagtggttttcggaaagtggcaagctggtaaccaagatgtttcagaagattcaggatttgattgatgataaagacgccctggtgttcgtgctgattgatgaggtggagagtctcacagccgcccgaaatgcctgcagggcgggcaccgagccatcagatgccatccgcgtggtcaatgctgtcttgacccaaattgatcagattaaaaggcattccaatgttgtgattctgaccacttctaacatcaccgagaagatcgacgtggccttcgtggacagggctgacatcaagcagtacattgggccaccctctgcagcagccatcttcaaaatctacctctcttgtttggaagaactgatgaagtgtcagatcatataccctcgccagcagctgctgaccctccgagagctagagatgattggcttcattgaaaacaacgtgtcaaaattgagccttcttttgaatgacatttcaaggaagagcgagggcctcagcggccgggtcctgagaaaactcccctttctggctcatgcgctgtatgtccaggcccccaccgtcaccatagaggggttcctccaggccctgtctctggcagtggacaagcagtttgaagagagaaagaagcttgcagcttacatctgatcctgggcttccccatctggtgcttttcccatggagaacacacaaccagtaagtgaggttgccccacacagccgtctcccagggaatcccttctgcaaaccaaacgttacttagactgcaagctagaaagccaccaaggccaggctttgttaaaagaagtgtattctatttatgttgttttaaaatgcatactgagagacaaacatcttgtcattttcactgtttgtaaaagataattcagattgtttgtctccttgtgaagaaccatcgaaacctgtttgttcccagcccacccccagtggatgggatgcataatgccagcaagttttgtttaacagcaaaaaaggaagattaatgcaggtgttatagaagccagaagagaaactgtgtcaccctaaagaagcatataatcatagcattaaaaatgcacacattactccaggtggaaggtggcaattgctttctgatatcagctcgtttgatttagtgcaaaaatgttttcaagactatttaatggatgtaaaaaagcctatttctacattataccaactgagaaaaaaatggtcggtaaagtgttctttcataataaataatcagacatggtcccatttgcaggaaaagtgcagactctgagtgttccagggaaacacatgctggacatcccttgtaacccggtatgggcgcccctgcattgctgggatgtttctgcccacggttttgtttgtgcaataacgttatcacatttctaatgaggattcacattaatataatataaaataaataggtcagttactggtctctttctccgaatgttatgttttgcttttatctcacagtaaaataaatataattaatggtttgcatgtgaaattcacttttgaaagaacatgttaccttaccttttgttttagaagttttcaagtattaaaatattttttagaaaaaaaaaaaaaaaaaaaaaaa

SEQ ID NO: 204 - DNA, 2561 bp, Homo sapiens
cgccaggaacagcttgaggtacctgagccctgccctccagcagcacccgagagggtcaggagaaaagcggaggaagctgggtaggccctgaggggcctcggtaagccatcatgaccacccggcaagccacgaaggatcccctcctccggggtgtatctcctacccctagcaagattccggtacgctctcagaaacgcacgcctttccccactgttacatcgtgcgccgtggaccaggagaaccaagatccaaggagatgggtgcagaaaccaccgctcaatattcaacgccccctcgttgattcagcaggccccaggccgaaagccaggcaccaggcagagacatcacaaagattggtggggatcagtcagcctcggaaccccttggaagagctcaggcctagccctaggggtcaaaatgtggggcctgggccccctgcccagacagaggctccagggaccatagagtttgtggctgaccctgcagccctggccaccatcctgtcaggtgagggtgtgaagagctgtcacctggggcgccagcctagtctggctaaaagagtactggttcgaggaagtcagggaggcaccacccagagggtccagggtgttcgggcctctgcatatttggcccccagaacccccacccaccgactggaccctgccagggcttcctgcttctctaggctggagggaccaggacctcgaggccggacattgtgcccccagaggctacaggctctgatttcaccttcaggaccttcctttcacccttccactcaccccagtttccaggagctaagaagggagacagctggcagcagccggacttcagtgagccaggcctcaggattgctcctggagaccccagtccagcctgctttctctcttcctaaaggagaacgcgaggttgtcactcactcagatgaaggaggtgtggcctctcttggtctggcccagcgagtaccattaagagaaaaccgagaaatgtcacataccagggacagccatgactcccacctgatgccctcccctgcccctgtggcccagcccttgcctggccatgtggtgccatgtccatcaccctttggacgggctcagcgtgtaccctccccaggccctccaactctgacctcatattcagtgttgcggcgtctcaccgttcaacctaaaacccggttcacacccatgccatcaacccccagagttcagcaggcccagtggctgcgtggtgtctcccctcagtcctgctctgaagatcctgccctgccctgggagcaggttgccgtccggttgtttgaccaggagagttgtataaggtcactggagggttctgggaaaccaccggtggccactccttctggaccccactctaacagaacccccagcctccaggaggtgaagattcaacgcatcggtatcctgcaacagctgttgagacaggaagtagaggggctggtagggggccagtgtgtccctcttaatggaggctcttctctggatatggttgaacttcagcccctgctgactgagatttctagaactctgaatgccacagagcataactctgggacttcccaccttcctggactgttaaaacactcagggctgccaaagccctgtcttccagaggagtgcggggaaccacagccctgccctccggcagagcctgggcccccagaggccttctgtaggagtgagcctgagataccagagccctccctccaggaacagcttgaagtaccagagccctaccctccagcagaacccaggcccctagagtcctgctgtaggagtgagcctgagataccggagtcctctcgccaggaacagcttgaggtacctgagccctgccctccagcagaacccaggcccctagagtcctactgtaggattgagcctgagataccggagtcctctcgccaggaacagcttgaggtacctgagccctgccctccagcagaacccgggccccttcagcccagcacccaggggcagtctggacccccagggccctgccctagggtagagctgggggcatcagagccctgcaccctggaacatagaagtctagagtccagtctaccaccctgctgcagtcagtgggctccagcaaccaccagcctgatcttctcttcccaacacccgctttgtgccagcccccctatctgctcactccagtctttgagacccccagcaggccaggcaggcctcagcaatctggcccctcgaaccctagccctgagggagcgcctcaaatcgtgtttaaccgccatccactgcttccacgaggctcgtctggacgatgagtgtgccttttacaccagccgagcccctccctcaggccccacccgggtctgcaccaaccctgtggctacattactcgaatggcaggatgccctgtgtttcattccagttggttctgctgccccccagggctctccatgatgagacaaccactcctgccctgccgtacttcttccttttagcccttatttattgtcggtctgcccatgggactgggagccgcccacttttgtcctcaataaagtttctaaagta

SEQ ID NO: 205 - DNA, 2984 bp, Homo sapiens
ggaaattcaaacgtgtttgcggaaaggagtttgggttccatcttttcatttccccagcgcagctttctgtagaaatggaatccgaggatttaagtggcagagaattgacaattgattccataatgaacaaagtgagagacattaaaaataagtttaaaaatgaagaccttactgatgaactaagcttgaataaaatttctgctgatactacagataactcgggaactgttaaccaaattatgatgatggcaaacaacccagaggactggttgagtttgttgctcaaactagagaaaaacagtgttccgctaagtgatgctcttttaaataaattgattggtcgttacagtcaagcaattgaagcgcttcccccagataaatatggccaaaatgagagttttgctagaattcaagtgagatttgctgaattaaaagctattcaagagccagatgatgcacgtgactactttcaaatggccagagcaaactgcaagaaatttgcttttgttcatatatcttttgcacaatttgaactgtcacaaggtaatgtcaaaaaaagtaaacaacttcttcaaaaagctgtagaacgtggagcagtaccactagaaatgctggaaattgccctgcggaatttaaacctccaaaaaaagcagctgctttcagaggaggaaaagaagaatttatcagcatctacggtattaactgcccaagaatcattttccggttcacttgggcatttacagaataggaacaacagttgtgattccagaggacagactactaaagccaggtttttatatggagagaacatgccaccacaagatgcagaaataggttaccggaattcattgagacaaactaacaaaactaaacagtcatgcccatttggaagagtcccagttaaccttctaaatagcccagattgtgatgtgaagacagatgattcagttgtaccttgttttatgaaaagacaaacctctagatcagaatgccgagatttggttgtgcctggatctaaaccaagtggaaatgattcctgtgaattaagaaatttaaagtctgttcaaaatagtcatttcaaggaacctctggtgtcagatgaaaagagttctgaacttattattactgattcaataaccctgaagaataaaacggaatcaagtcttctagctaaattagaagaaactaaagagtatcaagaaccagaggttccagagagtaaccagaaacagtggcaatctaagagaaagtcagagtgtattaaccagaatcctgctgcatcttcaaatcactggcagattccggagttagcccgaaaagttaatacagagcagaaacataccacttttgagcaacctgtcttttcagtttcaaaacagtcaccaccaatatcaacatctaaatggtttgacccaaaatctatttgtaagacaccaagcagcaataccttggatgattacatgagctgttttagaactccagttgtaaagaatgactttccacctgcttgtcagttgtcaacaccttatggccaacctgcctgtttccagcagcaacagcatcaaatacttgccactccacttcaaaatttacaggttttagcatcttcttcagcaaatgaatgcatttcggttaaaggaagaatttattccattttaaagcagataggaagtggaggttcaagcaaggtatttcaggtgttaaatgaaaagaaacagatatatgctataaaatatgtgaacttagaagaagcagataaccaaactcttgatagttaccggaacgaaatagcttatttgaataaactacaacaacacagtgataagatcatccgactttatgattatgaaatcacggaccagtacatctacatggtaatggagtgtggaaatattgatcttaatagttggcttaaaaagaaaaaatccattgatccatgggaacgcaagagttactggaaaaatatgttagaggcagttcacacaatccatcaacatggcattgttcacagtgatcttaaaccagctaactttctgatagttgatggaatgctaaagctaattgattttgggattgcaaaccaaatgcaaccagatacaacaagtgttgttaaagattctcaggttggcacagttaattatatgccaccagaagcaatcaaagatatgtcttcctccagagagaatgggaaatctaagtcaaagataagccccaaaagtgatgtttggtccttaggatgtattttgtactatatgacttacgggaaaacaccatttcagcagataattaatcagatttctaaattacatgccataattgatcctaatcatgaaattgaatttcccgatattccagagaaagatcttcaagatgtgttaaagtgttgtttaaaaagggacccaaaacagaggatatccattcctgagctcctggctcatccctatgttcaaattcaaactcatccagttaaccaaatggccaagggaaccactgaagaaatgaaatatgttctgggccaacttgttggtctgaattctcctaactccattttgaaagctgctaaaactttatatgaacactatagtggtggtgaaagtcataattcttcatcctccaagacttttgaaaaaaaaaggggaaaaaaatgatttgcagttattcgtaatgtcaaataccacctataaaatatattggactgttatactcttgaatccctgtggaaatctacatttgaagacaacatcactctgaagtgttatcagcaaaaaaaattcagtagattatctttaaaagaaaactgtaaaaatagcaaccacttatggtactgtatatattgtagacttgttttctctgttttatgctcttgtgtaatctacttgacatcattttactcttggaatagtgggtggatagcaagtatattctaaaaaactttgtaaataaagttttgtggctaaaatgacactaaaaaaaaaaaaaaaaaa

SEQ ID NO: 206 - DNA, 2704 bp, Homo sapiens
gcttagtgtaaccagcggcgtatattttttaggcgccttttcgaaaacctagtagttaatattcatttgtttaaatcttattttatttttaagctcaaactgcttaagaataccttaattccttaaagtgaaataattttttgcaaaggggtttcctcgatttggagctttttttttcttccaccgtcatttctaactcttaaaaccaactcagttccatcatggtgatgttcaagaagatcaagtcttttgaggtggtctttaacgaccctgaaaaggtgtacggcagtggcgagagggtggctggccgggtgatagtggaggtgtgtgaagttactcgtgtcaaagccgttaggatcctggcttgcggagtggctaaagtgctttggatgcagggatcccagcagtgcaaacagacttcggagtacctgcgctatgaagacacgcttcttctggaagaccagccaacaggtgagaatgagatggtgatcatgagacctggaaacaaatatgagtacaagttcggctttgagcttcctcaggggcctctgggaacatccttcaaaggaaaatatgggtgtgtagactactgggtgaaggcttttcttgaccgcccgagccagccaactcaagagacaaagaaaaactttgaagtagtggatctggtggatgtcaatacccctgatttaatggcacctgtgtctgctaaaaaagaaaagaaagtttcctgcatgttcattcctgatgggcgggtgtctgtctctgctcgaattgacagaaaaggattctgtgaaggtgatgagatttccatccatgctgactttgagaatacatgttcccgaattgtggtccccaaagctgccattgtggcccgccacacttaccttgccaatggccagaccaaggtgctgactcagaagttgtcatcagtcagaggcaatcatattatctcagggacatgcgcatcatggcgtggcaagagccttcgggttcagaagatcaggccttctatcctgggctgcaacatccttcgagttgaatattccttactgatctatgttagcgttcctggatccaagaaggtcatccttgacctgcccctggtaattggcagcagatcaggtctaagcagcagaacatccagcatggccagccgaaccagctctgagatgagttgggtagatctgaacatccctgataccccagaagctcctccctgctatatggatgtcattcctgaagatcaccgattggagagcccaacaactcctctgctagatgacatggatggctctcaagacagccctatctttatgtatgcccctgagttcaagttcatgccaccaccgacttatactgaggtggatccctgcatcctcaacaacaatgtgcagtgagcatgtggaagaaaagaagcagctttacctacttgtttctttttgtctctcttcctggacactcactttttcagagactcaacagtctcgtcaatggagtgtgggtccaccttagcctctgacttcctaatgtaggaggtggtcagcaggcaatctcctgggccttaaaggatgcggactcatcctcagccagcgcccatgttgtgatacaggggtgtttgttggatgggtttaaaaataactagaaaaactcaggcccatccattttctcagatctccttgaaaattgaggccttttcgatagtttcgggtcaggtaaaaatggcctcctggcgtaagcttttcaaggttttttggaggctttttgtaaattgtgataggaactttggaccttgaacttacgtatcatgtggagaagagccaatttaacaaactaggaagatgaaaagggaaattgtggccaaaactttgggaaaaggaggttcttaaaatcagtgtttcccctttgtgcacttgtagaaaaaaaagaaaaaccttctagagctgatttgatggacaatggagagagctttccctgtgattataaaaaaggaagctagctgctctacggtcatctttgcttagagtatactttaacctggcttttaaagcagtagtaactgccccaccaaaggtcttaaaagccatttttggagcctattgcactgtgttctcctactgcaaatattttcatatgggaggatggttttctcttcatgtaagtccttggaattgattctaaggtgatgttcttagcactttaattcctgtcaaattttttgttctccccttctgccatcttaaatgtaagctgaaactggtctactgtgtctctagggttaagccaaaagacaaaaaaaattttactacttttgagattgccccaatgtacagaattatataattctaacgcttaaatcatgtgaaagggttgctgctgtcagccttgcccactgtgacttcaaacccaaggaggaactcttgatcaagatgcccaaccctgtgatcagaacctccaaatactgccatgagaaactagagggcaggtgttcataaaagccctttgaacccccttcctgccctgtgttaggagatagggatattggcccctcactgcagctgccagcacttggtcagtcactctcagccatagcactttgttcactgtcctgtgtcagagcactgagctccacccttttctgagagttattacagccagaaagtgtgggctgaagatggttggtttcatgtgggggtattatgtaccc

SEQ ID NO: 207 - DNA, 1490 bp, Homo sapiens
aaacgcgggcgggcgggcccgcagtcctgcagttgcagtcgtgttctccgagttcctgtctctctgccaacgccgcccggatggcttcccaaaaccgcgacccagccgccactagcgtcgccgccgcccgtaaaggagctgagccgagcgggggcgccgcccggggtccggtgggcaaaaggtgagtgatgcggcctaccactcgccgggcctgccatgccctaggcattggtacccagagcaaagatttctaggaccaccccccgccgccacctcctggagcgggagatctgcgggtgcaggagaacacaccaggagctcggggcctggcattcccctgggcatgggtgtcgagggcggagacttccgggactcccacctccttgcgcgggtgagattcgagagatgggggacaggccaggagctcagaccgctctttgagactctcccgaaggagaatgggagggtaggggcgctgccagactccttccctggtgggcctagatgaagacgctcaaggaccctcgtgacttggccgagacaggggaagggagaagttgagtcgggcaaggaagagatgctaaagcctggggaattaagaacatgccagaatcatcccgagggagtctggaattagggagggtgaggactcgctaggatcgtcctgtggatctggtgagtataccctgagctgagcctgaccttggtgatgtggggagcctccatgacggctccccctgagattcaggtgggagaagatgcaccgtctggaggcctggcccatccagactcccaggtaaccccgaatactcttttttcaggctacagcaggagctgatgaccctcatgatgtctggcgataaagggatttctgccttccctgaatcagacaaccttttcaaatgggtagggaccatccatggagcagctggaacagtatatgaagacctgaggtataagctctcgctagagttccccagtggctacccttacaatgcgcccacagtgaagttcctcacgccctgctatcaccccaacgtggacacccagggtaacatatgcctggacatcctgaaggaaaagtggtctgccctgtatgatgtcaggaccattctgctctccatccagagccttctaggagaacccaacattgatagtcccttgaacacacatgctgccgagctctggaaaaaccccacagcttttaagaagtacctgcaagaaacctactcaaagcaggtcaccagccaggagccctgacccaggctgcccagcctgtccttgtgtcgtctttttaatttttccttagatggtctgtcctttttgtgatttctgtataggactctttatcttgagctgtggtatttttgttttgtttttgtcttttaaattaagcctcggttgagcccttgtatattaaataaatgcatttttgtccttttttagacaaaaaaaaaaaaaaaaaaaaaaaaaaaaaaaaaaaaaaaaaa

SEQ ID NO: 208 - DNA, 4734 bp, Homo sapiens
gcgagccgaagcgcgggaagcagctcttgtggatcctcagtggcggaggctcggtcacccggataggtaaaggaaaacatgcctgccacacggaagccaatgagatatgggcatacagagggacacacggaggtctgttttgatgattctgggagttttattgtgacttgtggaagtgatggtgatgtgaggatttgggaagacttggatgatgatgatcctaagttcattaatgttggagaaaaggcatattcatgtgctttgaagagtggaaaactggtcactgcagtttctaataatactattcaagtccacacatttcctgaaggagttccagatggtatattgactcgcttcactacaaatgcaaaccatgtggtctttaatggggatggtactaaaattgctgctggatctagtgattttctagtcaaaattgtggatgtgatggatagcagccaacagaaaacatttcgaggacatgatgcccctgttttaagtctttcctttgatcctaaggacatctttctggcatcagctagttgtgatggatctgtcagagtgtggcaaatttcagatcagacatgtgctattagttggccactgctacaaaaatgcaacgatgtgataaatgcaaaatcaatctgcagacttgcttggcagccaaaaagtgggaagttactggcaattcctgtggaaaaatctgttaagctatatagaagagaatcttggagtcatcaatttgatctttcagataatttcatctctcagaccctcaatatagtaacctggtctccctgtgggcaatatttagctgcaggtagtattaatggtctaatcatagtttggaatgtggaaaccaaagactgcatggaaagggtgaaacatgagaaaggttatgcaatttgtggtctggcatggcatcctacttgtggtcgaatatcgtatactgatgcggaaggaaatctagggcttctagagaatgtttgtgaccccagtggaaagacatcaagcagtaaggtatctagcagagtggaaaaggattataatgatctttttgatggagatgatatgagtaatgctggtgattttctaaatgacaatgcagttgagatcccttctttttcaaaagggattataaatgatgatgaggatgatgaagacctcatgatggcttcaggtcgtcctagacagcgaagtcacatcctagaagatgatgaaaactcagttgatatttcaatgctaaaaactggttctagtcttctcaaagaggaggaggaagatggtcaagaaggcagcattcacaatctaccacttgtaacatcccaaaggccattttatgatggacccatgccaactccccggcaaaagccatttcagtcaggttctacaccgttgcatctcactcacagattcatggtgtggaactctattggaattattcgctgctataatgatgagcaagacaatgccatagatgtggagttccatgatacctccatacaccatgcaacacacttatcaaacactttgaattatacaatagcagatctttcccacgaagctattttgttggcatgtgaaagcactgatgaactagcaagcaagcttcactgcctgcactttagttcttgggattcaagcaaagagtggataatagacttgcctcagaatgaggatattgaagccatatgtctcggtcaaggatgggctgctgccgctactagtgccctgcttcttcgattgtttactattggaggggttcaaaaagaggtattcagccttgctggacctgtggtgtcaatggcaggacatggagaacagcttttcattgtttatcacagaggtacaggatttgatggggatcagtgccttggagttcaactgctagagctggggaaaaagaaaaaacaaattttgcatggtgaccctcttcctcttacaaggaaatcctaccttgcatggattgggttttcagctgaaggtaccccttgttacgtggattcagaaggaattgttcgaatgcttaacagaggacttggtaatacgtggactcctatatgtaatacaagagagcactgcaaaggaaaatctgatcactactgggtggttggtatccatgaaaatccccagcaactaaggtgcattccttgtaaaggttctcggtttcccccaacccttccacgccctgctgttgctatattatcctttaagcttccttactgtcagattgcaacagagaaaggacaaatggaggagcaattttggcgttcagttatatttcacaaccaccttgattatttagctaaaaatggttatgaatatgaagagagcactaaaaatcaagcaacaaaagagcaacaggaacttttaatgaaaatgcttgcgctttcttgtaaactggagcgagaattccgttgtgtggaacttgctgatctaatgactcaaaatgctgtgaatttagccattaaatatgcttctcgctctcggaaattaatactggctcaaaaactaagtgaactggctgtagagaaggcagccgaattgacagcaacccaggtggaagaggaagaagaagaagaagatttcagaaaaaagctgaatgctggttacagcaatactgctacagagtggagccaaccaaggttcagaaatcaagttgaagaagatgctgaggacagtggagaagctgatgatgaagaaaaaccagaaatacataagcctggacagaactcgttttccaaaagtacaaattcctctgatgtttcagctaagtcaggtgcagttacctttagcagccaaggacgagtaaatccctttaaggtatcagccagttccaaagaaccagccatgtcaatgaattcagcacgttcaactaatattttagacaatatgggcaaatcatccaagaaatccactgcacttagtcgaactacaaataatgaaaagtctcccattataaagcctctgattccaaagccgaagcctaagcaggcatctgcagcatcctatttccagaaaagaaattctcaaactaataaaactgaggaagtgaaagaagaaaatcttaaaaatgtattatctgaaaccccagctatatgtcctcctcaaaacactgaaaaccaaaggccaaagaccgggttccagatgtggttagaagaaaatagaagtaatattttgtctgacaatcctgacttttcagatgaagcagacataataaaagaaggaatgattcgatttagagtattgtcaactgaagaaagaaaggtgtgggctaacaaagccaaaggagaaacggcaagtgaaggaactgaagcaaagaagcgaaaacgtgtggttgatgaaagtgatgaaacagaaaaccaggaagaaaaagcaaaagagaacctgaatttgtctaaaaagcagaaacctttagatttttctacaaatcagaaactatcagcttttgcatttaagcaggagtaaaggaagaaagtgaccctagggaagtaatggatttttttttactcatctttgaatatagactcgagtctttgggaaactcattatatatatattttttaaagagtttgaagcaactgtttgtctttataagataatgtagtaattatattggtgtaggtaacaggacatatgtaaaaactatcatctttgcagattactctgcctccaaatgcagggcctttcagagatgcattgtgattgtaattactgagttgaagctccaaccaatttgaatttgtttcttaaccttgaaaaatcattaaagccaaggtattaaaacctttgtgcattaataccttctaggggtttggttcatttggtttttgtcatgtgcaaggaaggacaatagtcctctttccaagtgtgttagcatagacttctctatatgtttctactagacctaggggatgacgtcttttaataatactggccctaaacatgtaaataatcttgtaggtgagactttttcttttgtgtttcggaaatttcctatgtggctttcagttgtctgtttgtatagcctggatttttttgaggtaaatgaaactttctcatttgtatatttggcttgatatggtcttaatattatctttccacgaaatggatatatttctagaaaatatatatttactaccataatttctaccaccacccccattttgctctgcattatacacagtagagaagaactgaagacactgctgtgacagtattgcagtccaaggcatcatgtgctcttggtgggatactctgattatcagcatcaacagtactttactgagcaagactttgaaggcctgagaagagagcaaagttatggaaagtatttaactcttattttatattgaacaaacaaggtttaatcatgtcatacatttttggttttctaagcagagactaatacaaatgcagccacataaaggcagtgtactgggggtgggagggaaggaaacaatcacataaaatcagctgactcaaaattgaggatagttaataggttgaaagggaaaaagtatgttgaaaatttagacataaatgaaccaagaatattccttatctggtgatgattaaagttaggaaaacatacattttttattttttaattagtagctgctatcagagacattatagcacagtggttatgagcacagattccaaagccagattacctaggttcggagacccgcttctctacctactactaatagttgggtcatgttgggccgg

SEQ ID NO: 209 - DNA, 8390 bp, Homo sapiens
tgttctaagaacggaagcatctgggctggatggaatttagcatcaagcagagtcccctttctgttcagagtgttgtaaagtgcataaagatgaagcaggcaccagaaatcctcggcagtgccaacgggaagactccgagctgcgaggtgaaccgcgagtgttctgtgttcctcagcaaagcccagctctccagtagcctgcaggagggggtcatgcagaagtttaacggccacgacgccctgccctttattccagccgacaagctgaaagatcttacttcccgggtgtttaatggagaacccggcgcacacgatgccaaactgcgttttgagtcccaggaaatgaaagggattgggacaccccctaacactacccctatcaaaaatggctctccagaaattaagctgaaaatcaccaaaacatacatgaatgggaagcctctctttgaatcttccatttgtggtgacagtgctgctgatgtgtctcagtcagaagaaaatggacaaaaaccagaaaacaaggcgagaaggaacaggaagaggagcataaaatatgactccttgctggagcagggccttgtcgaagcagctcttgtgtctaagatctcaagtccttcagataaaaagattccagctaagaaagagtcttgtccaaacactggaagagacaaagaccacctgttgaaatacaacgttggtgatttggtgtggtccaaagtgtcgggttacccttggtggccttgcatggtttctgcagatccactccttcacagctataccaaacttaaaggtcagaaaaagagtgcacgccagtatcacgtacagttctttggtgacgccccagaaagagcttggatatttgagaagagcctcgtagcttttgaaggagaaggacagtttgaaaaattatgccaggaaagtgccaagcaggcacccacgaaagctgagaaaattaagctattgaaaccaatttcagggaaattgagggcccagtgggaaatgggcattgttcaagcagaagaagctgcaagcatgtcagtggaggagcggaaagccaagttcacctttctctatgtgggggaccagcttcatctcaaccctcaagtagccaaggaggctggcattgctgcagagtctttgggagaaatggcagaatcctcaggagtcagtgaagaagctgctgaaaaccccaagtctgtgagagaagagtgcattcccatgaagagaaggcggagggccaaactgtgtagctctgcagagaccctggagagtcaccccgacatagggaagagtactcctcaaaagacggcagaggctgaccccagaagaggagtagggtctcctcctgggaggaagaagaccacagtctccatgccacgaagcaggaagggagatgcagcatcccagtttttggtcttctgtcaaaaacacagggatgaggtggtagctgagcacccagatgcttcaggtgaggagattgaagagctgctcaggtcacagtggagtctgctgagtgagaagcagagagcacgctacaacaccaagtttgccctggtggcccctgtccaggctgaagaagactctggtaatgtaaatgggaaaaaaagaaaccacacaaagaggatacaggaccctacagaagatgctgaagctgaggacacacccaggaaaagactcaggacggacaagcacagtcttcggaagagagacacaatcactgacaaaacggccagaacaagctcttacaaggccatggaggcagcctcctcgctcaagagccaggcagcaacgaaaaatctgtctgatgcatgtaaaccactgaagaagcgaaatcgggcttccacggcagcatcttcagctcttgggtttagcaaaagttcatctccttctgcatccttaactgagaatgagcttttgtgggagcccacaccagtcaagttggatttgaacccagctgctctgtactgcacttagaatgatgtaatattccaggatgctgctgcaggtggcgtatcatcgtacacactcagtgacatttctatcacaatcattttatggaagatgtgtgataatctgtttttactggtattaataaacacatacaatgaagaaaacagataacaaattttaagaccaaggtaagataactaatcaaggccatttaatccgtcacattcatctcataatagaaacacgttcatattccagtggtcaatgtagatttcaagttgaaaggcagtccctttagttgggggctgtccagagctgcagcagggctttgcacggaaggggtggccctgttagagttgcttctcctctagtttgtaacttactggacttttgtggaaaatatcagcgtcgctaccctcagaaacaaactaacagcacacgttaggaggagtcctcatcagctgttctcattgccagtgagatatattcagtattgtagatactacactaatttccaacataagaggcaggaagagttttgattctatccttttttactaaacagttttattatgacactagatacagtaaatttttagaaaaaaataccatttacagtattattgtgaaccatttaacccttttgatccaaggccccggaccaaggggatactgtaatcaggttatgtacaccaacctctgcatcagttgcttctatagagcatcagccctcatgtttcattgtcttaatgtcggggagcagcctggtgtcctgccccaggtgtccgcatttttgcatggtaaggaaaaggcttacttgcccttcagctcataaaagcagaaggtgtgctattcacagtaccatgcgagtagcccacagttaattcccggcagattctttggctgtgttttatctttaatgaacgtttctgactaatattttgttgtaaaccattaagtaatgtaacgcatgtaagatgcttagggtgcctggccaggactccgtggtttcctgttgtgacagtaataatggttataataataaaaatgataaaattgccatcattctatttttatccaaaagtataaattttgctttggcatgaaaagtggtcctcttgactgcattatgcatgcgaggatgaaataaacctagaagtggcagaacactggatttgtgtgtgtggcgctttagggtgctggactgtatggctgagggctggttgggttcctctattggctctgctcaaatgttgcaggatacatagccccaaagatggtctaggagcaatctaagctgtgttactccaaaggacatgaaaaagctcaagagtaaaattaaaattctcaaaaaaaaaccccacgaaatttaaagatggggaaaaaaagatggtataaaaatggctctggttcaataagcagtcacccaaagtaaagactctatcttgaaaggcttttggtgaaaatgaagggatttcatttgaaattacagcatgatgaattttgcatgggtggccagccagctagcccataactgatagatgcattagaagtcagccagcgcataggtgctccctctatattatggagaaagcaaaaccctgcaaatgaccaaatggtgtccaaagagcagcatgacattggcatcagctgaataaccaggggcacatgggggaacgtggatgggaatgatagtgtatctcagcggggggtggggtgacatcgttccctggggacattgggaaggtgggcaggggcaagtgaactcagcactctgcagtgagagggacagtcccatgtgtggcagcattgtcccacttcagatgccaggagtgggctcatcctagaggagcggagttttccgagaggaccatctcctggtttcctgaaggaggtgggtggaaacggctcttgtttgaaagaacttagggaggaccattggcttgccaagagtacagaaattcattatgctgctaatttaacgtggaattccttcatttcataagaacctcaaaataatggtgatacattctagccttaagacatttgaattgccggttgttgaggtgaattttgtttgtcatacatggaaccattttagtcccatttgactcacttcagaccatcttccacacactatgtctgtgcttggagaggggaggtggctctccagtgtaaaacttgaggcattcactagaggtgaaaacttgtcagaatatataaaagcttagattgtagctgttctaaaaacgtaagtactccattgtaatagggtggcatcttcaggtagtgcacatattggcaatagaggtcctgaattgtttttctaagactgatctgagagccattgggccatcaagcctttatatatctgcttctaaaattgccccacctgctctagatggatctttgggcctttcctcagtgttcatgcaaaaattaaatgtcttttttcagcatactgactccaggtgtagttacatctcagtgctgtcttgagtatatattttatctcttatacctgtatctcccaactagaaacagctccagtgtttttaagagaatgtttcttaaaaccaataggaaacttaagcgaggtttcatgacacaacctttcatgtcgtgaaaggcagagggtgactgtgtgtgatgtgcagagtccttggacaggagtcgggggctcctctgtcccactgctgcttcttgagtgggtggagtggtgcttagaggatctccgagaggtccccgcagctctagggagatctgattttgtgttttttgtttaagtacttcacacagaagcctaggtagatttaaaatggggtgctcagggactggggaacaagacggggtggggtggggagatgggcatttggagagtctcatgtagctggagacgttaagagctgagcacaccacaggaaaggagggaggatgctgtgtgagagccatgctgtcaggagcaagcttgctgctcctgtgctgccctggccctggccttgcttgcccatggtgtgtgtgtccagaggtgtgtgtgaggctgccagaacaagtgctgggtctgtcacagagaagtttaaaaaagaaaactaagattataaattagcatctagttccaaaaccaaaaaaagtgcctgtggatgtatataaaattaagatgataagaaagtgctcctgagaaggctcttgccagaagcctgatgtgagtgtgtggcacctgtgatggcagggctgtgagctgggcttctgtcctcctctgtgtcccggcatggaagccagtataagcatttccaaatgagggaaaagtccttggctcgtttgatccagttgagttgaaagggttgccttggcagcagaggctcctctgatggctgacatcagtcactgcgtctgggcctgagacgtgcatggagggctgtaaagccacggattcccctcgctggagaggctcctgtctgatagcggtagatgaaaaataaggtcgttatgactttggcaacttgcttcatttctttttcatttgacttacaacacacttctctaacatctagcccttttaaatttttaattaatttcaaagcttcctctggccaggtagacttttgtatacagaccaggtgagagcccttttgccttagtgtgaaaatgtaacattttatgcttttaaaatcaatagattcatcaccttagttttttaaaaaaaatctataaatagggtaattgctgaggtgtgcggtttatctttgagatgataaagctaaattatagtcttttgccagagaaactgaggtaactgtcattagaaaaggtttcttaaaatactcacaaagctgttattggcttcttaacttctaaaatttggggggtcttgcatttatttattatttatttatttatttatttagagacagagtctcaccctgttggccaggctggagtgcagtaagtggcacaatctcggctcactgcaacctccgcctccttggttccagcaattcttctgcctcagcctcccgagtagctgggactacaagcggctgccaccacacctggctatttttttttgtatttttagtagagacagggtttcgccatattggccaggctggtcttgaactcctgacctcgtgatccacccgcctcaccctcccaaaatgctgggattacaggcgtaagccactgcacctggcggggtcttgcttattttaaaagaaatattctgattcatattttaggactttttgtcaacgaaattggttttgatccctttgggtaccatttttattgttttatgtagaatgttagaaattaccactaatttacctggcagtgatgtcaaattgactgtaattagcaggtagaaaattatttgtattatattcatctgattcctatactggatgagcaaggagcatgcttcctttgggacattcttacagcagggtgtctctccaacagcccgacaggcctcatctttttggttggatacctttgaactccatggttacgtgttaggtccacatttgtgtttttttctagcctacctatagttgttggcctttttgcatataactctcgggtaatattttgaagcatgctgaccatccaggcatatagtattttcaagaaatgactgaggtaggggtgggggtcctggtccggctgatgggggtttgctcagcactgtgccagtggaagcaggtgtattgtgggcagttttgtcattgtcctcaagtccttcgcagacagtgcacagcctgctgtctgcagtcggccagaccaggctcctccccagcacactccctgtgggatggccgctgctcaggacacagtgggacaaagttgggttgataggatattttagattcattttacctttgacaagggcaggccttgaattgggagcagcagccacctggcctcactctggccacaggtgacacttggtccttgctgccacctgcttggggctatgtggctacggctacacaaaagcctgtgcaggttagaagacgactgtggtgtgcagtggtgctctgggagtggagacttcctctgttctcagagactcacccccagccctgaccctagaatttagggatagccaggaagtttctagtttgtgtaacctagaagggtcactttaataaaaattgttatgaactatagtattttagatgatgagtgacttattttaattccactttaacattttactgtgctgttaacttggaagacctgtttgaaattagtcttgatttcacactcatttaatctgctgagcacagggctgttgtcatttgtaaacgcaaacactgtggaggtacttctcgccatcagcttccttctttacaaaaccatcatttcaacatgaaaattatgtcagtttatagaaatatttattgttcaaggtctgtaattgtatttcaaaaacgatgtcgtattcaagttgtgaagggatttgttttgtcaaaaaattaaaaactcaatgtgtatgacgccactctgaagagtaggtgagcgctttgcagtcacagaaggtggcatctgactgcggctcatacaggtcaccctgaagggccacgtgcttttagcagttggctggaatgtgttcactaggttccgttatgtttggtaatatcatcttgaaaagtccctgtaatagatcaaggagactgcattccctgccctgaaggaatgtatttctaaggcaaataggcaacttggtactatcttattctgagtagagagtggagaaagtattttcagactgaagaaaactttgaaaagtcaggagctaagctgctcggagctcagtgccgcagcatggctgtggtggacgcgggaaacaacgggaaagttcttgacagagtctgtgtccgctcagtccctgcacttttcctttccaaatgcatctcgttggatatggaatagatcgtagatgttgtagactgagatttgggactatgttgggaccgtacaggtgaatgtgccacctccacaaatggcttctccgagtgagtcacgtcacctggtgcgtggaggtggagcctgcggctggagtaaggcttgctgtgggacgccctcgtactttgctctccttgcgggtggttgccgagccgagagcattggatcctccccgactgtggctagttgtctgtccggtggctgggagggggtgtggtgggaaaaagtcggaatctctgcaatctgtgtcatggactgtactattgtaaggtctatattctgtatgtgggtcccagaccctgatcaggaaatgagcctcatgtgtgtcgttaacatttatatatttccattcaaaatatgtattcagtgtttatttcctcaaaacagactttgttaatgtaggaaatctctccaagtggaaacgtgctaactttttctgtaaatctgaaataaaaggtgctgttccttcctctg

SEQ ID NO: 210 - DNA, 6066 bp, Homo sapiens
aaagggacaatgtcccccgagcggtggaggcggcggcggctgcggaggccgcggcaccggcaccgggagcggcagcggcggtagcggcagcgacggccgcaccaaggaggggagctccgagccccggcacctggccggcggcgccgcctccccggcccacaatgccccgctgagccggtgcagcagctgagtggatccaagcagagaaaatccgatggaggggtctctggcaggcagcctggctgcaccagatcgtccccaaggcccagagagactgcctggcccggcgccaagggagaacatcgagggtggggccgaagctgctgagggggaaggtggcatcttccggtccacccgttacctgcctgtcaccaaggagggcccccgagacattctggatggcagaggtggcatctctgtggccaactttgacccaggcaccttcagcctgatgcgctgtgacttctgcggggctggcttcgacacacgggccggcctctccagccacgcccgggcccacctacgtgacttcggtatcaccaactgggagctcactgtctcacccatcaacatcctgcaggagctgctggccacctctgctgctgagcagccccccagccccctgggccgagagcctgggggtccgcctggcagcttcctgacctcccgtcggccccgcttacctctcacggtgccctttccacccacctgggctgaggaccctgggccagcctatggagatgccagggcgcgcgacaagcttccagcagctgcagccgtccgccctcagggcccagacgaacggtttcgctcgtggcactcggcgctcggcgctcggcactcggcaggccaacctgggcgcgccctgaggggcggggcggagcgggtttggcggcggcggcagcggcactcggcactcggcgctcagctgctcccgcctggggcggccgccccgccgccgcccccacccccgccgccgccgccaccaccaccgccaccgccaccgccgccgcgggacgggcccaaggccgagccggagccggggcccgggcccgcgtccgctcccgcgcccggcctgggttctgaggaaaacgcaatggtggccatggacttgggctctccctcgctccctaagaagagcctgcctgtccctggggccctggagcaggtggccagtcggctgagcagcaaagtggctgcagaggttcctcatggcagcaaacaggagctgcaggacctcaaggcccagagcctgaccacctgcgaggtctgcggtgcctgctttgagacccgaaagggcctgtccagccacgcgcgctcccacctgcggcagctgggagtggcagagtcggaaagcagcggcgcacccatcgacctcctctacgagcttgtgaagcagaagggtctgcctgacgcccaccttgggctgcccccaggcctggctaagaagtccagctcactgaaggaggtggtcgccggggccccccggcccggcttgctcagcctggccaagcccttggatgcccctgctgtcaacaaagccatcaagtcgcctcccggcttctcggccaagggcctgggccacccgcccagctctccactcctcaaaaagacaccactggccctggcgggctcccctacccctaagaatcctgaggacaagagcccccagctgtccctgagcccccggccggcctccccaaaggcacagtggcctcagtctgaggatgaggggcccttgaacctcactttagatagtgacgggggcagagagctggactgccagctgtgcggtgcctggtttgagacccgcaagggcctgtctagccacgcccgtgcccacctgcgccacctgggcgtcagcgatccggacgccaagggatcccccatagacgtgctccacgggctcatcaggagggacggcgtccagatccgcctcccacccaggcgcggcgccctggcccacccggggcggccgcctcccacctccgcggccctctccttgcttccccccccaccgccggccaagaaggccaagctgaaggccgcgggtatggccagcccctgggggaagcaggacctctcggccgccgcagccgccggcattttctgggcctctgatgtggagccgtctcctctcaacctctcctcaggcccagagccagcacgagacatccgctgcgagttctgtggtgagttcttcgagaaccgcaagggcctctcgagccacgcgcgctcccatctgcggcaaatgggcgtgaccgagtggtacgtcaatggctcgcccatcgacacgctgcgggagatcctgaagagacggacccagtctcggcctggtggacctcccaacccaccagggccaagcccaaaagccctggccaagatgatgggcggcgcaggtcctggcagctcactggaagcccgcagcccctcggaccttcacatctcacccttggccaagaagttgccaccaccaccgggcagccccctgggccactcaccaactgcctctcctcctcctacggcccgaaagatgttcccaggcctggctgcaccctccttgcccaagaagctgaagcctgaacaaatacgggtggagatcaagcgggagatgctgccgggggcccttcatggggaactgcacccatctgagggtccctggggggcaccacgggaagacatgacacccctgaacctgtcgtcccgggcagagccggtgcgcgacatccgctgtgagttctgcggcgagttcttcgagaaccgcaagggcctgtcgagtcacgcgcgctcacacctgcggcagatgggtgtgaccgagtggtccgtcaatggttcgcccatcgacacactgcgagagatcctcaagaagaagtccaagccgtgcctcatcaagaaggagccaccggctggagacctggcccctgccctggctgaggacgggcctcccaccgtggcccctgggcccgtgcagtccccactgccgctgtcgcccctggctggccggccaggcaaaccaggtgcagggccggcccaggttcctcgtgagctcagcctgacgcccatcactggggccaagccctcagccactggctacctgggctcagtggcagccaagcggcccctgcaggaggaccgcctcctcccagcagaggtcaaggccaagacctacatccagactgaactgcccttcaaggcaaagacccttcatgagaagacctcccactcctccaccgaggcctgctgcgagctgtgtggcctttactttgaaaaccgcaaggccctggccagccacgcacgggcacacctgcggcagttcggcgtgaccgagtggtgcgtcaatggctcgcccatcgagacactgagcgagtggatcaaacaccggccccagaaggtgggcgcctaccgcagctacatccagggcggccgccccttcaccaagaagttccgcagtgccggccatggccgtgacagtgacaagcggccgtccctggggctggcacccgggggcctggccgtggtcggccgcagtgccggaggggagccagggcccgaggctggccgggcagccgacggtggtgagcggcctctggcagccagcccgccaggcaccgtgaaggctgaggagcaccagcggcagaacatcaacaaatttgaacgccgacaagcccgccctccagatgcctccgcagcccggggaggcgaggacaccaatgacctacagcagaagctggaggaggtgcggcaacccccaccccgagtccggccagtcccctccctggtgccccggcccccccagacatcacttgtcaagttcgtgggcaacatctacaccctcaaatgcaggttctgtgaggtggaattccagggccccctctccatccaggaagagtgggtgcggcacttacagcggcacatcctggagatgaacttctccaaagcggaccccccacctgaggagtcccaggccccgcaggcacagacagcggcggcagaggctccctaacacaaaagcattccagatcccctctcgtgccacctctgtctcctcttcttcctcctctgtgtccttgtccctcttcctctttctttccgtttccaaaggagcaagccaaaacctcaaaccggcgccccttgggggccgggcacactacagccagggcgccgggagccagctagctgcccttcccccagcccgaggactctggggccacagggtgtcttccttcagcccatgcccacctggtccagcaggggcagcagccaggtctctgatggcagccggtctggtcacaggggaggacagcactcccccgtctagcagccaggcagggcgatgtctgccatccgtggccatttgcaaagaccccaaagacccctgttctggttccctctctcccccatgaatatcctctcacacacatgtacatgcgaacacacacaacacgcacctcgtgagacccgggacctgccccggacccccagttcctgggttgaacgaccacatcatgccacggtgcttgctcaggggaagccacgctccctctgtggggcctgctggggcctgggagccccccactgagcccacaatgccacggaaatccttgttggctgcccccgagaggggccttcccagctgggaagagctcagagctgacagctgcctcctgccatgtcaaggccccccaaagagcctcaggggctctggggccctggagggtggggttggggggtgggactctcctcccccactcctgctccctctcccttttcactgttgctttctatgtatagctccctagacctttcacttttttaaaaacgcgttttgtgtagagaataaggaacgtggatctttttattttgcaatcctgggccagctagaagccaggagctgattgaccttttaacttttttcagtggccacattttggttatcgatgtacctagaagtatgtaaattagattaaatttctcttctggaaacaccctggggcaggcggccagcgtgtgtttttctgtcaagtggacaggctggcattggctggcagccggggctgggatcggggcctcctctgtccagagcgccatggaggccctgggttttccagttggccgccaagccgaccagacgcagctggggatgagcccaagttcccagctgttggctctttaggccatggctgggagggggtctctggctggctggcaaagcggctccagtgagcagatgaaccagggttctgggcagcctgtctgggaagggagccaggatcaagaagcagttgaggctagaggagcttatcaaaggcaggagctaccagcgagggtgtcagggacccgttgggagcatttgggtgggggccagtggggttgtagagagctggaactcacctgcttttaatacatgtgacttctagtgagacacatgcacccctgacccaaggaacatgcggggaaaagaggagccactggctcctttgcgatgttatttattttctcgctctgcaaatgtttattgaacatttctgagattttaagagattttgttggctgctccttcttgtttattgcatgtggtttttcagctcatcgtttttactaaacggtcaagtgctggagagtgggaacgacctcatggcgtgtggacagaaggggccacctctacccccagccctgctttctgggccctcccaccataccccttcctgggaaggagggattaacaggctgcaataacgcccacaagggtggtcttggcccacacgtctgctcctgtggggtcaggacgcacatctcgcctggtggcagaaggccgcaaccacttctctccatcctgtgctgtgggtgggtggatgtatccaggacttaggaagcagggagagcatcttgtgagctgactcaaaggtgtttcttcctctttcaacttttcataagtcagtttttatttttttattttattttttgagacagggtctcattttgttgcccaagctggagtgcagtgtagggacctcggctcgctgcagtctctgcctcctgggttcaagtgattctcctgcctcagcc

SEQ ID NO: 211 - DNA, 4146 bp, Homo sapiens
cggtccgttgttcatttgccattcgacctccgccagggcctggtcggacggaaacgctccgccggctttattgtcgcttcgttatgtggcggagccgagcagtttagcgtgcctctcaccctcagcgcctgcgaagccggcggcggcgtcgggactcctcggcgcgcggaggaaggatatctgtgtggaggatcggtgtgtgcgcgcgcggctttaaagagggggcagcggagggtctccccgcactccgctgctcaacttcgaaggcctcgctcgctgcaggctcgctcctcacctctccgccgcccgcccccttctccgcgcgggacgctgcccggagcgcggcggggcgggggtggaggacgagagagcggtcggaggcgtcggcccggcagcggcagcggcagcggacgcgtgcagcagacccgggagcgagcgcgagccgggctgccgggcgagagggcgaggccgagccccgcgagaccggaacgccgggggcgggggcgagacagagggggagccgcggggagcgcgcgggacgcggcccgaggccgtgcgcgagccggggcaccgggcggcggcggcggcggcgcgcgccatgtcgttcagtgaaatgaaccgcaggacgctggcgttccgaggaggcgggttggtcaccgctagcggcggcggctccacgaacaataacgctggcggggaggcctcagcttggcctccgcagccccagccgagacagcccccgccgacagcgccgcccgcgcttcagccgcctaatgggcggggggccgacgaggaagtggaattggagggcctggagccccaagacctggaggcctccgccgggccggccgccggcgccgccgaggaagccaaggagttgctgctcccccaagacgcgggcggccccacctcgcttggcggtggcgcggggggccccctgctagcggaaaggaaccgtcggactctggccttccgaggcggcggcggcgggggtctcggcaacaatggcagtagccgcggccgccccgagacctcggtgtggcccttgaggcatttcaatgggcgagggccggcgactgtggatctggagctggacgcgctggaggggaaggagttgatacaggacggcgcgtccctgagcgacagcaccgaggacgaggaggagggggcgagcctgggcgacggcagcggggcggaaggcggcagctgcagcagcagcaggcggtcgggcggcgatggcggggacgaagtggagggcagcggtgtgggagctggcgaaggagagactgtccagcacttcccgctcgcgcggcccaagtctctaatgcagaagctccaatgctccttccagacctcctggctcaaggactttccctggctgcgctattccaaggatactggtcttatgtcttgcggctggtgccaaaagacccctgcagatgggggaagcgtggaccttcccccagtggggcatgatgagctttcgcgagggacccgcaactacaagaaaaccctcctcctgaggcaccacgtctctaccgagcacaaactccacgaagccaacgccccagagtcagaaataccatcagaggaggggtactgggactttaataggaggccaaatgagaactcttattgctatcaacttctgcgacaactaaatgaacagagaaagaaaggtattctttgtgatgtcagcattgtggtaagcggaaaaatcttcaaagctcataagaacatcctggttgcaggcagccgtttctttaagactttatattgcttttcaaacaaagaaagccctaaccaaaacaatactacccacttagatattgctgcagttcaaggtttttcagtcatcttggacttcttgtattctggtaacctggtgctcacaagccaaaatgccattgaagttatgaccgtggccagctatcttcaaatgagtgaagttgttcaaacttgccgaaatttcattaaagatgccttaaatataagcattaaatcagaagctccagagtctgtagttgtggactataataatagaaaaccagttaatagagatggtctgtcttcatcacgggatcaaaaaattgccagtttttgggcaacacggaatcttaccaatttggcaagtaatgtaaagattgaaaatgatggttgtaatgtcgacgagggccaaatagaaaactaccaaatgaatgacagtagttgggtccaggatggatctcctgaaatggctgaaaatgaatctgaaggtcaaacaaaagtgtttatttggaataatatgggctcccagggaattcaagagactggcaaaacaaggaggaaaaaccaaactacaaaaagatttatttataatattccacctaataatgaaacgaatttagaagattgctcagtaatgcagccacctgttgcctatccagaagaaaatacactactcatcaaggaagaaccagatttagatggtgctctactctcggggccagatggtgataggaatgtgaatgcaaatttattggctgaagctggcactagtcaagatggaggtgatgctggtacttcacatgatttcaagtatggtttgatgcctggtccttcaaatgatttcaagtatggattattgccagaatcttggccaaaacaagaaacctgggaaaatggtgaatcatctctaatcatgaacaagttaaaatgccctcattgtagctatgtagccaaatacagacgaacactaaaaaggcacttgctcattcacacaggagtgagatcatttagctgtgatatttgtggaaaactgtttactcgaagagaacatgtaaaaagacattccctggtgcataaaaaggataaaaaatacaaatgtatggtgtgtaagaagatcttcatgttagcagccagtgttggaataagacatggatctcgacgttatggtgtttgtgtagactgtgcagataaatcacagccaggagggcaagaaggtgtagatcagggacaggatacagaattccctcgggatgaagaatacgaggagaatgaagtaggagaagctgatgaagagctagttgatgatggagaagatcagaatgatccctctcgatgggatgaatcaggagaagtttgtatgtctctagatgattaactgacctactatactcctcaaggatgctgcatttggacctaatatgaatcgacaatttggattgttgaacttgaaggcttgcaaaatatggtacatgctggatagtagttatgttgctgtgaaaactgtagggtcaaagccttatagcaaaaaaaatttttttttatatttgcacaggactatacagcaaacaaccatgtggttggattacatggagtccccacatactcagtcagttatcaaagtaaaatattttttatttataggatatacagtaactatttgggtcctatgaaaatagtccttaaagagcttacattcatgtgctactttaacatgaatggagaaaatccgtttatggaagtacagtgacaattgacccaatcactctgtccatcaaaccactcaggctagtttgtactagtagagttttgtttctatttttatttttattaattttattttttttaatacagattttcagtgaggggctttttcaatcccattggttctattttcttgtatttttccatttaatttgcttcataacttaaaccaagtctcttctagtcttaggtattatttctcgattttgtgctgatgggcatgtttataagaactggagaggtaatttattggaatgaactaactgacttcctccattcccctcttcctttttgacatgaattttactacttcacaaatgaagaatgatgttatgaagttagcttggcggagttgacaaataccactaaaatgattatgatttagaagtaactttcttctgctgctctaatctgataaatggttactatatgatattttctgacatggtatttggttttgggtatctgttactttggcactattcttgtttgcctctttatttttgccagtgtactatacctcagtcctatttgaaagacctaattgaaagaaaaatcatagaaataagtaaaatgatttgttttataatttatccaccatgtccagtttggttagct

SEQ ID NO: 212 - DNA, 2832 bp, Homo sapiens
agtcgaggtatcttctccccaaccactgctcttattttaattattgcagacggaagttgaagactattgacatagtaaatagctctgggtggcttgaaacgaaagtttaactttgcggacaaacaggacttattgtagggggtggtcaaaatagtcccggcggggcggggccatgacccctgacgtcgccggtccggcgcgcagttcagtttggcggttccggtaccgctctcacattggggcgggatgtgggagcggctgaactgcgcagcagaggacttttattctcgtctccttcagaaatttaatgaagaaaagaaaggaatccgtaaagacccatttctctatgaggctgatgtccaagtgcagttgatcagcaaaggccaaccaaaccctttgaaaaatattctaaatgaaaatgacatagtattcatagtggaaaaagtgcctttagaaaaggaagaaacaagtcatattgaagaacttcaatctgaagaaactgccatatctgatttctctactggcgaaaatgttggaccacttgctttaccagttgggaaggcaaggcagttaattggactttacaccatggctcacaatcctaatatgacccatttgaagattaatctgccagttactgcccttcctcccctttgggtaagatgtgacagttcagatcctgaaggtacttgttggctaggagctgagcttatcacaacaaacaacagcattacaggaattgtcttatatgtggtcagttgtaaagctgataaaaattattctgtaaatcttgaaaacctaaaaaatttacacaagaaaagacatcacttgtctactgtaacatccaaaggctttgcccagtatgagctctttaagtcctctgccttggatgatacaatcacagcatcacaaactgcgatcgctttggatatttcctggagtcctgtggatgagattcttcaaatccctccactctcttcaactgcaactctgaatattaaagtggaatcaggagagcccagaggtcctttgaatcatctctacagagaactgaaatttcttcttgttttggctgatggtttgaggactggtgtcactgaatggctcgagcccctggaagcaaaatctgctgttgaacttgttcaggaatttctgaatgacttaaataagctggatggatttggtgattctacaaaaaaagacactgaggttgagaccttgaagcatgacactgctgcagtcgatcgttccgtcaagcgtcttttcaaagttcggagtgatcttgattttgctgagcaactgtggtgcaaaatgagcagtagtgtgatttcataccaagacttggtgaagtgtttcacattgatcatccagagtctacaacgtggtgatatacagccatggctccatagtggaagtaacagtttactaagtaagctcattcatcagtcttatcatggaaccatggacacagtttctctcagtgggactattccagttcaaatgcttttggaaattggtttggacaaactaaagaaagattatatcagttttttcataggtcaggaacttgcatctttgaatcatttggaatacttcattgctccatcagtagatatacaagaacaggtttatcgtgtccaaaaactccaccatattctagaaatattagtcagttgcatgcctttcattaaatctcaacatgaactcctcttttctttaacacagatctgcataaagtattacaaacaaaatcctcttgatgagcaacacatttttcagctgccagtcagaccaactgctgtaaagaacttatatcaaagtgagaagccacagaaatggagagtggaaatatatagaggtcaaaagaagattaagacagtttggcaactgagtgacagctcacccatagaccatctgaattttcacaaacctgatttttcggaattaacactaaacggtagcctggaagaaaggatattctttactaacatggttacctgcagccaggtgcatttcaagtgaagtgtgctgatgaagtcctctataagcacaagccaaaaagagaaagagaaaaaaaggtaattattgtagaacctgaaaacagcaatgtatggaaaccctcaaagcagaaaagggaggaagatcctgaagattctcttatgaagctccaaaattgataatcctgtctcagctctgcctcctcaggaggagcattagtagaacagcagtgatgaggacacagagggagcagacagtgggtaccacgatctccgtaaccatttgcatgtgacttagcaagggctctgaaatgacaaagagaacgagcaccacaaatgagaacaggatcattttagtaaatacagctttatcccaaaagctttagctgtattgggaaaacttaaaaaatagcatcctcaaattttctgattcttatttgccatgaaatagaacttagtaaattaaatgttatttgaaaatgttataagagctttgtaaatatttcagaaaatatgggataaatgcctgaatttggttcttctacaggtgctataataaagtccatctctcaatacttatactttctaaattcatctcagaatattagcagccatattccacagttcctataatttttactgggggggatttgtgataggaaagtccttgggaaacatttccaatctttcaaaatattattgtgtatcttaagaagtataggaacttgtatgttgaaatgttgtatggtagttcttgtatagttaaataataatctttttaagagttaatgataagcatatgttatgtgcattattaataaaatagtggccactt

SEQ ID NO: 213 - DNA, 4478 bp, Homo sapiens
gacgtcggcggttgccgtggagagacccgctcggtcccgaccgagagctggcgtcaggagccgcagggtcacagcgtgtctttgaagctgcctccgccgccaccatgagcggccgaagtcggggtcgaaagtcctcccgcgccaaaaaccggggcaaaggccgcgccaaagcccgagtccgccctgctccggacgacgccccgcgcgacccggacccttcacagtaccagagtctcggggaagacacccaggcggcacaggtgcaggctggcgcggggtggggtggcctggaagccgctgcgtccgcgcagctcctccggctcggggaggaggccgcctgccggctccccctggactgtggcctcgcgctgcgggcccgagctgcgggggaccacgggcaggccgcggccaggcccggcccggggaaggccgcatctctctcggagcgcctggccgcagacactgtcttcgtgggaacagcgggaaccgtgggaaggccgaaaaatgccccccgcgttggaaaccggcgtggccctgccgggaagaaggccccagaaacctgtagcaccgcggggagggggcctcaggtcatagctggtgggaggcagaagaaaggggcggcaggggagaatacctcggtgtcagctggggaggaaaagaaggaagagagggatgcagggtcggggcccccagcgacggaaggcagcatggatacgctggagaacgtgcagctgaagctggagaacatgaacgcccaggcggacagggcctaccttcggctctccaggaagtttgggcagttgcgactgcagcacttggagcgcaggaaccacctcatccaaaatatcccgggcttctgggggcaagcatttcagaaccatccccagctagcatcctttctgaatagccaagagaaagaggtactgagctacttaaacagcttggaagtggaagagctcggccttgccagattgggctacaaaatcaagttctacttcgatcgcaacccgtatttccaaaataaggtgctcatcaaggaatatgggtgtggtccttctggccaggtggtgtctcgttctactccaatccagtggctcccagggcatgatctccagtccctaagccagggaaacccagaaaacaaccgtagtttctttgggtggttttcaaaccacagctccattgagtctgacaagattgtggagataatcaacgaagaattgtggcccaatcccttgcagttctaccttttgagtgaaggggctcgtgtagagaaaggaaaggaaaaagaaggcaggcaaggtccaggaaagcagccaatggagactactcagcctggggtgagccaatccaactgatcctgcacaagtctccctgctacctcctgctgggctgctcctggttgactacatatttggctctctgccttctcttcatgttggcctctgtgtactatagaccctttggactttagttacaagaatatggcatttatgatcatgttcttttgcctcccatagcctcttgcttttctacgttagtgtcacatgttatgtgatcgcacccggactgttcatatgttaagcacacatactttagatgtgtgctccctgttatctacattgcctggaccttgttcttggctctggcctttcctacttgtctttaacatggacactcatgagtcatcctccaggacgaccagtgcatcctcaagctctgctccttcagggccagtgacttgctgggcttcgtgttcatgctggccatgcatgtcatctatgcaagcgtttccattgccactgcagaatgaagccagtgcacatggtattagtcatcagccagaacttcctgttctgtgggtctggggtcaccagctgagatgtcacctgctttatttctggctttggcctgtggtctgtgatacccatcctgcttgatgttctgcagaatggcacttgactgctgggcatgcatgaagttaagggcaagaaacagtatgccatgtgttctgtaccatcatgtgtctcttcttgcttctgggcccttctactggtgaactttcatcaagatctgcgccatgccgtgtcactatcaagccattaagttttgtctgggttgctgtcagccccagttggcttcctggtcaacaaggacctcaagaactgcctgtggaccgaggccccctaccagtgcatgagacacacacctaccctccccagctttccaggaaccctactggctgccagactgatgggcgggctggtatgtgtggacatgtgttcactgtcattatgctgtggctccaggtgagggtgaggactgggcctatatagaatccagataccattgtcaacttcccttattcccgtctaagatgtgagcagagtgccatagtaggggttctgggaagaggtatttctgatttgtgggcctctgcttgcttgacttcaggtcacttatacttcttattttgcttgcctgccttcatccctcatttcctccctctcattcttctttcctccctccctttcctggtagcctcctttcctccccttctgccttccccttccttctttccttattcttttttattttgtttaaatagtaccacagagaaaacaactgaaaaaccacatttttctacatacagctggggaggtagctgagaacttggcactgcgcacacatactaggttgaaagagagttgaggaaaccagaaggccaagtggatctgctggcaaaccctgaacctgtctcctgcgcttgctctacagttctgaagttgaaaatccttttcatgcctagcatctgcttgagttataaaccccaaggcagccatgtcatagactagtgtttactcttgttttgactttgttttaatgcttcctaagacccaagtgcctcctgctgtttcctcctttgtggtagcctctggccatctggacctcaatccccagctttcccactttcagcagtcctttgctctctttgcttctacctcaaatagccccaggagtgggctttagtctccaatatggagcatctcaagcttctcctgggggatggggattgggatgggcagaatctgttttggatctccgggttatttccagtgggtgtaaaagcagagctgggcctttccctctcttatccctgagggtgggtaagaaggactgtatctacacctgttcttccctaccttctcttttgttagggaggcctcattctaagttcctcaagagagtccttggcttaaagctgtagcaagggtgtgctaggtgggggatttggagcaaaaccgtcgagtaggcatgatactggtatggagtgggcctgcaaaatcagacagaaatggcttgagaagccgcagggggagcatgcctgtctctcagtgatagagtatgggagggacctccctagcttggaaaatgagaattgaaggggttatgaacaaataggatgcctagttgaggatgttcccaaagttttgtccaatcttatcattagtagattttataagccacagagacaaaccagaaacggaataatgttactttggatgctttatttttttgttctaggtgtggctttgtacatgcagaagaatgctatatgctgcacattttgcctttaaagtcttacgactttccccattttagtctaatgggaagatacagatgtgcaagtctgcttttttgttttttgttattatttttttttttttgctctgtgttatggacattttcagacatgcacagaagtggagaggatggtccttggaccccatgtgtccatcacctagctgcatcacttatcagctatggtcaacctggtttcatctgtatctctctcttttcacctgtattgtttattgaaaatccaagacactatgccaatgcaaccgtgactactttgggagattggtagtctcttttgatggtgatagtgatggggtgcactatcataatcacatcaggtctgctttttgcttttaatgttaactaatgaagttccagagatgggccttagaaatgtgttttaagaattaacaaggagtctcaaaaagaaatgagagggatgcttcctttcccttgcatctacaaaacaagagagagactgttctgttgtaaaactctttcaaaaattctgatatggtaaggtacttgagacccttcaccagaatgtcaatctttttttctgtgtaacatggaaacttgtgtgaccattagcattgttatcagcttgtactggtctcataactctggttttggaagaataatttggaaattgttgctgtgttctgtgaaaataacctccccaaaataattagtaactggttgttctacttggtaatttgacaccctgttaataacgcaattatttctgtgttcttaaacagtataaatagttgtaagtttgcatgcatgatggaaaaataaaaacctgtatctctgttataaaaaaaaaaaaaaaa

SEQ ID NO: 214 - DNA, 5777 bp, Homo sapiens
gcggacactcctctcggctcctccccggcagcggcggcggctcggagcgggctccggggctcgggtgcagcggccagcgggcctggcggcgaggattacccggggaagtggttgtctcctggctggagccgcgagacgggcgctcagggcgcggggccggcggcggcgaacgagaggacggactctggcggccgggtcgttggccgggggagcgcgggcaccgggcgagcaggccgcgtcgcgctcaccatggtcagctactgggacaccggggtcctgctgtgcgcgctgctcagctgtctgcttctcacaggatctagttcaggttcaaaattaaaagatcctgaactgagtttaaaaggcacccagcacatcatgcaagcaggccagacactgcatctccaatgcaggggggaagcagcccataaatggtctttgcctgaaatggtgagtaaggaaagcgaaaggctgagcataactaaatctgcctgtggaagaaatggcaaacaattctgcagtactttaaccttgaacacagctcaagcaaaccacactggcttctacagctgcaaatatctagctgtacctacttcaaagaagaaggaaacagaatctgcaatctatatatttattagtgatacaggtagacctttcgtagagatgtacagtgaaatccccgaaattatacacatgactgaaggaagggagctcgtcattccctgccgggttacgtcacctaacatcactgttactttaaaaaagtttccacttgacactttgatccctgatggaaaacgcataatctgggacagtagaaagggcttcatcatatcaaatgcaacgtacaaagaaatagggcttctgacctgtgaagcaacagtcaatgggcatttgtataagacaaactatctcacacatcgacaaaccaatacaatcatagatgtccaaataagcacaccacgcccagtcaaattacttagaggccatactcttgtcctcaattgtactgctaccactcccttgaacacgagagttcaaatgacctggagttaccctgatgaaaaaaataagagagcttccgtaaggcgacgaattgaccaaagcaattcccatgccaacatattctacagtgttcttactattgacaaaatgcagaacaaagacaaaggactttatacttgtcgtgtaaggagtggaccatcattcaaatctgttaacacctcagtgcatatatatgataaagcattcatcactgtgaaacatcgaaaacagcaggtgcttgaaaccgtagctggcaagcggtcttaccggctctctatgaaagtgaaggcatttccctcgccggaagttgtatggttaaaagatgggttacctgcgactgagaaatctgctcgctatttgactcgtggctactcgttaattatcaaggacgtaactgaagaggatgcagggaattatacaatcttgctgagcataaaacagtcaaatgtgtttaaaaacctcactgccactctaattgtcaatgtgaaaccccagatttacgaaaaggccgtgtcatcgtttccagacccggctctctacccactgggcagcagacaaatcctgacttgtaccgcatatggtatccctcaacctacaatcaagtggttctggcacccctgtaaccataatcattccgaagcaaggtgtgacttttgttccaataatgaagagtcctttatcctggatgctgacagcaacatgggaaacagaattgagagcatcactcagcgcatggcaataatagaaggaaagaataagatggctagcaccttggttgtggctgactctagaatttctggaatctacatttgcatagcttccaataaagttgggactgtgggaagaaacataagcttttatatcacagatgtgccaaatgggtttcatgttaacttggaaaaaatgccgacggaaggagaggacctgaaactgtcttgcacagttaacaagttcttatacagagacgttacttggattttactgcggacagttaataacagaacaatgcactacagtattagcaagcaaaaaatggccatcactaaggagcactccatcactcttaatcttaccatcatgaatgtttccctgcaagattcaggcacctatgcctgcagagccaggaatgtatacacaggggaagaaatcctccagaagaaagaaattacaatcagagatcaggaagcaccatacctcctgcgaaacctcagtgatcacacagtggccatcagcagttccaccactttagactgtcatgctaatggtgtccccgagcctcagatcacttggtttaaaaacaaccacaaaatacaacaagagcctggaattattttaggaccaggaagcagcacgctgtttattgaaagagtcacagaagaggatgaaggtgtctatcactgcaaagccaccaaccagaagggctctgtggaaagttcagcatacctcactgttcaaggaacctcggacaagtctaatctggagctgatcactctaacatgcacctgtgtggctgcgactctcttctggctcctattaaccctccttatccgaaaaatgaaaaggtcttcttctgaaataaagactgactacctatcaattataatggacccagatgaagttcctttggatgagcagtgtgagcggctcccttatgatgccagcaagtgggagtttgcccgggagagacttaaactgggcaaatcacttggaagaggggcttttggaaaagtggttcaagcatcagcatttggcattaagaaatcacctacgtgccggactgtggctgtgaaaatgctgaaagagggggccacggccagcgagtacaaagctctgatgactgagctaaaaatcttgacccacattggccaccatctgaacgtggttaacctgctgggagcctgcaccaagcaaggagggcctctgatggtgattgttgaatactgcaaatatggaaatctctccaactacctcaagagcaaacgtgacttattttttctcaacaaggatgcagcactacacatggagcctaagaaagaaaaaatggagccaggcctggaacaaggcaagaaaccaagactagatagcgtcaccagcagcgaaagctttgcgagctccggctttcaggaagataaaagtctgagtgatgttgaggaagaggaggattctgacggtttctacaaggagcccatcactatggaagatctgatttcttacagttttcaagtggccagaggcatggagttcctgtcttccagaaagtgcattcatcgggacctggcagcgagaaacattcttttatctgagaacaacgtggtgaagatttgtgattttggccttgcccgggatatttataagaaccccgattatgtgagaaaaggagatactcgacttcctctgaaatggatggctcccgaatctatctttgacaaaatctacagcaccaagagcgacgtgtggtcttacggagtattgctgtgggaaatcttctccttaggtgggtctccatacccaggagtacaaatggatgaggacttttgcagtcgcctgagggaaggcatgaggatgagagctcctgagtactctactcctgaaatctatcagatcatgctggactgctggcacagagacccaaaagaaaggccaagatttgcagaacttgtggaaaaactaggtgatttgcttcaagcaaatgtacaacaggatggtaaagactacatcccaatcaatgccatactgacaggaaatagtgggtttacatactcaactcctgccttctctgaggacttcttcaaggaaagtatttcagctccgaagtttaattcaggaagctctgatgatgtcagatatgtaaatgctttcaagttcatgagcctggaaagaatcaaaacctttgaagaacttttaccgaatgccacctccatgtttgatgactaccagggcgacagcagcactctgttggcctctcccatgctgaagcgcttcacctggactgacagcaaacccaaggcctcgctcaagattgacttgagagtaaccagtaaaagtaaggagtcggggctgtctgatgtcagcaggcccagtttctgccattccagctgtgggcacgtcagcgaaggcaagcgcaggttcacctacgaccacgctgagctggaaaggaaaatcgcgtgctgctccccgcccccagactacaactcggtggtcctgtactccaccccacccatctagagtttgacacgaagccttatttctagaagcacatgtgtatttatacccccaggaaactagcttttgccagtattatgcatatataagtttacacctttatctttccatgggagccagctgctttttgtgatttttttaatagtgctttttttttttgactaacaagaatgtaactccagatagagaaatagtgacaagtgaagaacactactgctaaatcctcatgttactcagtgttagagaaatccttcctaaacccaatgacttccctgctccaacccccgccacctcagggcacgcaggaccagtttgattgaggagctgcactgatcacccaatgcatcacgtaccccactgggccagccctgcagcccaaaacccagggcaacaagcccgttagccccaggggatcactggctggcctgagcaacatctcgggagtcctctagcaggcctaagacatgtgaggaggaaaaggaaaaaaagcaaaaagcaagggagaaaagagaaaccgggagaaggcatgagaaagaatttgagacgcaccatgtgggcacggagggggacggggctcagcaatgccatttcagtggcttcccagctctgacccttctacatttgagggcccagccaggagcagatggacagcgatgaggggacattttctggattctgggaggcaagaaaaggacaaatatcttttttggaactaaagcaaattttagacctttacctatggaagtggttctatgtccattctcattcgtggcatgttttgatttgtagcactgagggtggcactcaactctgagcccatacttttggctcctctagtaagatgcactgaaaacttagccagagttaggttgtctccaggccatgatggccttacactgaaaatgtcacattctattttgggtattaatatatagtccagacacttaactcaatttcttggtattattctgttttgcacagttagttgtgaaagaaagctgagaagaatgaaaatgcagtcctgaggagagttttctccatatcaaaacgagggctgatggaggaaaaaggtcaataaggtcaagggaagaccccgtctctataccaaccaaaccaattcaccaacacagttgggacccaaaacacaggaagtcagtcacgtttccttttcatttaatggggattccactatctcacactaatctgaaaggatgtggaagagcattagctggcgcatattaagcactttaagctccttgagtaaaaaggtggtatgtaatttatgcaaggtatttctccagttgggactcaggatattagttaatgagccatcactagaagaaaagcccattttcaactgctttgaaacttgcctggggtctgagcatgatgggaatagggagacagggtaggaaagggcgcctactcttcagggtctaaagatcaagtgggccttggatcgctaagctggctctgtttgatgctatttatgcaagttagggtctatgtattta

SEQ ID NO: 215 - DNA, 2387 bp, Homo sapiens
agacacctctgccctcaccatgagcctctggcagcccctggtcctggtgctcctggtgctgggctgctgctttgctgcccccagacagcgccagtccacccttgtgctcttccctggagacctgagaaccaatctcaccgacaggcagctggcagaggaatacctgtaccgctatggttacactcgggtggcagagatgcgtggagagtcgaaatctctggggcctgcgctgctgcttctccagaagcaactgtccctgcccgagaccggtgagctggatagcgccacgctgaaggccatgcgaaccccacggtgcggggtcccagacctgggcagattccaaacctttgagggcgacctcaagtggcaccaccacaacatcacctattggatccaaaactactcggaagacttgccgcgggcggtgattgacgacgcctttgcccgcgccttcgcactgtggagcgcggtgacgccgctcaccttcactcgcgtgtacagccgggacgcagacatcgtcatccagtttggtgtcgcggagcacggagacgggtatcccttcgacgggaaggacgggctcctggcacacgcctttcctcctggccccggcattcagggagacgcccatttcgacgatgacgagttgtggtccctgggcaagggcgtcgtggttccaactcggtttggaaacgcagatggcgcggcctgccacttccccttcatcttcgagggccgctcctactctgcctgcaccaccgacggtcgctccgacggcttgccctggtgcagtaccacggccaactacgacaccgacgaccggtttggcttctgccccagcgagagactctacacccaggacggcaatgctgatgggaaaccctgccagtttccattcatcttccaaggccaatcctactccgcctgcaccacggacggtcgctccgacggctaccgctggtgcgccaccaccgccaactacgaccgggacaagctcttcggcttctgcccgacccgagctgactcgacggtgatggggggcaactcggcgggggagctgtgcgtcttccccttcactttcctgggtaaggagtactcgacctgtaccagcgagggccgcggagatgggcgcctctggtgcgctaccacctcgaactttgacagcgacaagaagtggggcttctgcccggaccaaggatacagtttgttcctcgtggcggcgcatgagttcggccacgcgctgggcttagatcattcctcagtgccggaggcgctcatgtaccctatgtaccgcttcactgaggggccccccttgcataaggacgacgtgaatggcatccggcacctctatggtcctcgccctgaacctgagccacggcctccaaccaccaccacaccgcagcccacggctcccccgacggtctgccccaccggaccccccactgtccacccctcagagcgccccacagctggccccacaggtcccccctcagctggccccacaggtccccccactgctggcccttctacggccactactgtgcctttgagtccggtggacgatgcctgcaacgtgaacatcttcgacgccatcgcggagattgggaaccagctgtatttgttcaaggatgggaagtactggcgattctctgagggcagggggagccggccgcagggccccttccttatcgccgacaagtggcccgcgctgccccgcaagctggactcggtctttgaggagcggctctccaagaagcttttcttcttctctgggcgccaggtgtgggtgtacacaggcgcgtcggtgctgggcccgaggcgtctggacaagctgggcctgggagccgacgtggcccaggtgaccggggccctccggagtggcagggggaagatgctgctgttcagcgggcggcgcctctggaggttcgacgtgaaggcgcagatggtggatccccggagcgccagcgaggtggaccggatgttccccggggtgcctttggacacgcacgacgtcttccagtaccgagagaaagcctatttctgccaggaccgcttctactggcgcgtgagttcccggagtgagttgaaccaggtggaccaagtgggctacgtgacctatgacatcctgcagtgccctgaggactagggctcccgtcctgctttggcagtgccatgtaaatccccactgggaccaaccctggggaaggagccagtttgccggatacaaactggtattctgttctggaggaaagggaggagtggaggtgggctgggccctctcttctcacctttgttttttgttggagtgtttctaataaacttggattctctaacctttaaaaaaaaaaaaaaaaaaaaaaaaaaaaaaaaaaaaaaaaaaaaaaaaaaaa

SEQ ID NO: 216 - DNA, 818 bp, Homo sapiens
ccacgcgtccggcggggagccgggagcacggtggagcggtggagggcgtcactgggtttcggcgtctggcaagcggttcagctgtctgctccctagcagccggccttcgggtcgggcgtctccgccggctactgccgcttcagttctcccggtgtggccacgagtcgggttgcactgctgtgatccatcctcatctcctaaagatgcatcctgacttatctccacacttgcacactgaagaatgcaacgtcttgattaacttgcttaaggaatgtcacaaaaatcacaacattctgaaattttttggttattgtaatgatgttgatcgggagttgagaaaatgcctgaagaatgagtacgtagaaaacaggaccaagagcagggagcatggcattgcaatgcgaaagaaactttttaatcctccagaggaatccgaaaaataaattgtattttcactcgatgccttggctgagagaagacctaaagactctgggttgatacctgaaagaatcctgtcttatttggtctccataatcctttgaatggaaagtgacctgtgagagattgaaccatggagaaatatgaaaaccctggattctgagtatttgttgggcagggcgtttagtactgtctcccctttaccagcaaacctgacttcaccatgtttattccctttgcctacaaccagttaatatctgagtaacttatctccttcaatataataatttaaataaaaaaaaaaaaaaaaaaaaaaaaaaaaaaaaaaaaaaaaaaaaaaaaaaaaaaaaaaaaaaaaaaaaaaaaaaaaaaaaaaaaaa

SEQ ID NO: 217 - DNA, 3376 bp, Homo sapiens
ggcgaccgaacgcggcggtcggcagcgttcgcgcgggggcctgcgaagcgctgctcggggccggcactgcccgcggggaggacgcgccgccgccgccacccagcgccgccgccgccgccgcctccagccgggccgccgcgcgtcccgggggccggccccgcgagcgcaggagtaaacaccgccggagtcttggagccgctgcagaagggaataaagagagatgcagggatttgtgaggttacggcgccccagctgcaagatgcactagccggctgaacccgggatcggctgacttgttggaaccggagtgctctgcacggagagtggtggatgagttgaagttgccttcccggggctcattttccacgctgccgagaggaatccgagaggcaaggcaatcacttcgtcttgccattgattgggtatcgggagctttttttttctcccctctctctttcttttcctccgtcttgttgcatgcaagaaaattacagtccgctgctcgcccgccctgggtgcgagatattcagccccgctctctcccgtgcattgtgcaacccaaagatgaaagaccgaaggggagaaagttaaagaaatcgcccacatgcgctggatcagtccacggcttggggaaaggcatccagagaaggtgggagcggagagtttgaagtctttacaggcgggaagatggcggactggagctgaaagtgttgattgggaaacttgggtgattcttgtgtttatttacaatcctcttgacccaggcaggacacatgcaggccaaaaaacgctatttcatcctgctctcagctggctcttgtctcgcccttttgttttatttcggaggcttgcagtttagggcatcgaggagccacagccggagagaagaacacagcggtaggaatggcttgcaccaccccagtccggatcatttctggccccgcttcccggacgctctgcgccccttcgttccttgggatcaattggaaaacgaggattccagcgtgcacatttccccccggcagaagcgagatgccaactccagcatctacaaaggcaagaagtgccgcatggagtcctgcttcgatttcaccctttgcaagaaaaacggcttcaaagtctacgtatacccacagcaaaaaggggagaaaatcgccgaaagttaccaaaacattctagcggccatcgagggctccaggttctacacctcggaccccagccaggcgtgcctctttgtcctgagtctggatactttagacagagaccagttgtcacctcagtatgtgcacaatttgagatccaaagtgcagagtctccacttgtggaacaatggtaggaatcatttaatttttaatttatattccggcacttggcctgactacaccgaggacgtggggtttgacatcggccaggcgatgctggccaaagccagcatcagtactgaaaacttccgacccaactttgatgtttctattcccctcttttctaaggatcatcccaggacaggaggggagagggggtttttgaagttcaacaccatccctcctctcaggaagtacatgctggtattcaaggggaagaggtacctgacagggataggatcagacaccaggaatgccttatatcacgtccataacggggaggacgttgtgctcctcaccacctgcaagcatggcaaagactggcaaaagcacaaggattctcgctgtgacagagacaacaccgagtatgagaagtatgattatcgggaaatgctgcacaatgccactttctgtctggttcctcgtggtcgcaggcttgggtccttcagattcctggaggctttgcaggctgcctgcgtccctgtgatgctcagcaatggatgggagttgccattctctgaagtgattaattggaaccaagctgccgtcataggcgatgagagattgttattacagattccttctacaatcaggtctattcatcaggataaaatcctagcacttagacagcagacacaattcttgtgggaggcttatttttcttcagttgagaagattgtattaactacactagagattattcaggacagaatattcaagcacatatcacgtaacagtttaatatggaacaaacatcctggaggattgttcgtactaccacagtattcatcttatctgggagattttccttactactatgctaatttaggtttaaagcccccctccaaattcactgcagtcatccatgcggtgacccccctggtctctcagtcccagccagtgttgaagcttctcgtggctgcagccaagtcccagtactgtgcccagatcatagttctatggaattgtgacaagcccctaccagccaaacaccgctggcctgccactgctgtgcctgtcgtcgtcattgaaggagagagcaaggttatgagcagccgttttctgccctacgacaacatcatcacagacgccgtgctcagccttgacgaggacacggtgctttcaacaacagaggtggatttcgccttcacagtgtggcagagcttccctgagaggattgtggggtaccccgcgcgcagccacttctgggataactctaaggagcggtggggatacacatcaaagtggacgaacgactactccatggtgttgacaggagctgctatttaccacaaatattatcactacctatactcccattacctgccagccagcctgaagaacatggtggaccaattggccaattgtgaggacattctcatgaacttcctggtgtctgctgtgacaaaattgcctccaatcaaagtgacccagaagaagcagtataaggagacaatgatgggacagacttctcgggcttcccgttgggctgaccctgaccactttgcccagcgacagagctgcatgaatacgtttgccagctggtttggctacatgccgctgatccactctcagatgaggctcgaccccgtcctctttaaagaccaggtctctattttgaggaagaaataccgagacattgagcgactttgaggaatccggctgagtgggggaggggaagcaagaagggatgggggtcaagctgctctctcttcccagtgcagatccactcatcagcagagccagattgtgccaactatccaaaaacttagatgagcagaatgacaaaaaaaaaaaggccaatgagaactcaactcctggctcctgggactgcaccagactgctccaaactcacctcactggcttctgtgtcccaagactaggttgtgtacagtttaattatggaacattaaataattatttttgaaatgattgctatgcaggtttaaacttttttaatgatcaaaactattaaaaaccagagttctttgtttaatcaaaaaaaaaaaaaaaaa

SEQ ID NO: 218 - DNA, 2706 bp, Homo sapiens
attgtccggagtgggtccttgacattcaggaaagatacatccttagacctttcaaaatttgtcatgcctctctaacctaaaacagccctcattaaatgcactttaatccgagcactgtatggcttggaaagaattatgagtgaggagaggagcctttccttattggccaaagccgtggatcccagacaccccaatatgatgacagatgtggttaaacttctctctgcggtatgcattgtaggggaagaaagcatccttgaagaagttttagaagctttaacttcagctggtgaagaaaaaaaaattgacagatttttttgtattgtggaaggcctccggcacaattcagttcaactgcaagtagcttgtatgcagctcatcaatgccctggttacatctcctgatgatttggatttcaggcttcacatcagaaatgaatttatgcgttgtggattgaaagagatattgccaaatttaaaatgcattaagaatgatggcctggatatccaacttaaagtctttgatgagcataaagaagaagatttgtttgagttatcccatcgccttgaagatattagagctgaacttgatgaagcatatgatgtttacaacatggtgtggagcacagttaaagaaactagagcagagggatattttatttctattcttcagcatcttttgctgattcgaaatgattattttataaggcaacaatacttcaaattaattgatgagtgtgtatcccagattgtattgcatagagatggaatggatccagacttcacatatcgaaaaagactagatttagatttaacccagtttgtagacatttgcatagatcaagcaaaactagaagagtttgaagagaaagcatcagaactttacaagaaatttgaaaaagagtttaccgaccaccaagaaactcaggctgaattgcagaaaaaagaggcaaagattaatgagcttcaagcagagctacaagcttttaagtctcagtttggtgccttgccagctgattgtaatattcctttgcctccctctaaagaaggtggaactggccactcagcacttcctcctccgcctccactgccttctggtggaggggtgccgcctccacctcctcccccaccacctcctccacttccaggaatgcggatgccattcagtggtcctgtgcctccaccacctcccctgggattccttggaggacaaaattctcctcctctaccaatcctgccatttgggttgaaaccaaagaaagaatttaaacctgaaatcagcatgagaagattgaattggttaaagatcagacctcatgaaatgactgaaaactgtttctggataaaagtaaatgaaaataagtatgaaaacgtggatttgctttgtaaacttgagaatacattttgttgccaacaaaaagagagaagagaagaggaagatattgaagagaagaaatcgattaagaaaaaaattaaagaacttaagtttttagattctaaaattgcccagaacctttcaatcttcctgagctcttttcgggtgccatatgaggaaatcagaatgatgatattggaagtagatgaaacacggttggcagagtctatgattcagaacttaataaagcatcttcctgatcaagagcaattaaattcattgtctcagttcaagagtgaatatagcaacttatgtgaacctgagcagtttgtggttgtgatgagcaatgtgaagagactacggccacggctcagtgctattctctttaagcttcagtttgaagagcaggtgaacaacatcaaacctgacatcatggctgtcagtactgcctgcgaagagataaagaagagcaaaagctttagcaagttgctggaacttgtattgctaatgggaaactacatgaatgctggctcccggaatgctcaaaccttcggatttaaccttagctctctctgtaaactaaaggacacaaaatcagcagatcagaaaacaacgctacttcatttcctggtagaaatatgtgaagagaagtaccctgatatactgaattttgtggatgatttggaacctttagacaaagctagtaaagtctctgtagaaacgctggaaaagaatttgaggcagatgggaaggcagcttcaacagcttgagaaggaattggaaacctttccccctcctgaggacttgcatgacaagtttgtgacaaagatgtccagatttgttatcagtgcaaaagaacaatatgagacactttcgaagttacacgaaaacatggaaaagttataccagagtataataggatactatgccattgatgtgaagaaggtgtctgtggaagactttcttactgacctgaataacttcagaaccacattcatgcaagcaataaaggagaatatcaaaaaaagagaagcagaggaaaaagaaaaacgtgtcagaatagctaaagaattagcagagcgagaaagactcgaacgccaacaaaagaaaaagcgtttattagaaatgaagactgagggtgatgagacaggagtgatggataatctgctggaggccttgcagtccggggctgccttccgcgacagaagaaaaaggacaccgatgccaaaagatgttcggcagagtctcagtccaatgtctcagaggcctgttctgaaagtttgtaaccatggtaataaaccgtatttataaattacaaaaaaaaaaaaaaaa

SEQ ID NO: 219 - DNA, 7776 bp, Homo sapiens
gcggcccggtgcgggtgtcggggagaccgggctctctgcccggcgcggcgcggcgcggctcggcccacgagcgaccaccgacatggagtgggctcgggcggccaagtagccgcttctccggagcccggtgccagtgccgcccgcagcccgccttccacccccggccgcgccgccggtcaggccctagggtgaagccgggaggaaaatgaagagttttcaccggaatccgttgaaaataggactgactgcaaagccttaaagaaagaaggacctcgggaggagaaacgaaaagccgcctccgggcaagacttggcgtgctccgagccgaggggctgcttcagggacctcgccccctccctttcccgctggagaaattgccgctgatgcattatccaagtggtggttgggaggatttgcagcaacatttttggttttccctcccccttctatgcattctgtttttttcctcccttttctgtttttcttcttcccgggaagtgaattgctgatgcaaatcggactttattcattaatgatgcaaccggattcgtttcaggattacgttgcacgagttgaattttgaatgaaggagaagagtttttttttttttttttaaagaagtgttgactctctagttcgttgtacttttaattattattttatttaaatatacgacttaattgtattcttttaaaaatgcattaagtatatattttatggtaatttaccctcaaaatatatgtatatgggtgaaattgaagacgcttcagttaagtgaggttactggtgtgttggatgtttaattcagcaccagcattgcatgacagttgtttgaataacaagtggtttatttttaaaaccataccttttaaaatttaggttcagataatagtaaaagtcatcataataatttaaaggaaaaccagcagaaatcgaagcaaacatgtctggagaagtgcgtttgaggcagttggagcagtttattttggacgggcccgctcagaccaatgggcagtgcttcagtgtggagacattactggatatactcatctgcctttatgatgaatgcaataattctccattgagaagagagaagaacattctcgaatacctagaatgggctaaaccatttacttctaaagtgaaacaaatgcgattacatagagaagactttgaaatattaaaggtgattggtcgaggagcttttggggaggttgctgtagtaaaactaaaaaatgcagataaagtgtttgccatgaaaatattgaataaatgggaaatgctgaaaagagctgagacagcatgttttcgtgaagaaagggatgtattagtgaatggagacaataaatggattacaaccttgcactatgctttccaggatgacaataacttatacctggttatggattattatgttggtggggatttgcttactctactcagcaaatttgaagatagattgcctgaagatatggctagattttacttggctgagatggtgatagcaattgactcagttcatcagctacattatgtacacagagacattaaacctgacaatatactgatggatatgaatggacatattcggttagcagattttggttcttgtctgaagctgatggaagatggaacggttcagtcctcagtggctgtaggaactccagattatatctctcctgaaatccttcaagccatggaagatggaaaagggagatatggacctgaatgtgactggtggtctttgggggtctgtatgtatgaaatgctttacggagaaacaccattttatgcagaatcgctggtggagacatacggaaaaatcatgaaccacaaagagaggtttcagtttccagcccaagtgactgatgtgtctgaaaatgctaaggatcttattcgaaggctcatttgtagcagagaacatcgacttggtcaaaatggaatagaagactttaagaaacacccatttttcagtggaattgattgggataatattcggaactgtgaagcaccttatattccagaagttagtagcccaacagatacatcgaattttgatgtagatgatgattgtttaaaaaattctgaaacgatgcccccaccaacacatactgcattttctggccaccatctgccatttgttggttttacatatactagtagctgtgtactttctgatcggagctgtttaagagttacggctggtcccacctcactggatcttgatgttaatgttcagaggactctagacaacaacttagcaactgaagcttatgaaagaagaattaagcgccttgagcaagaaaaacttgaactcagtagaaaacttcaagagtcaacacagactgtccaagctctgcagtattcaactgttgatggtccactaacagcaagcaaagatttagaaataaaaaacttaaaagaagaaattgaaaaactaagaaaacaagtaacagaatcaagtcatttggaacagcaacttgaagaagctaatgctgtgaggcaagaactagatgatgcttttagacaaatcaaggcttatgaaaaacaaatcaaaacgttacaacaagaaagagaagatctaaataagctggaagttcatacagaagctctagctgctgaagcatctaaagacaggaagctacgtgaacagagtgagcactattctaagcaactggaaaatgaattggagggactgaagcaaaaacaaattagttactcaccaggagtatgcagcatagaacatcagcaagagataaccaaactaaagactgatttggaaaagaaaagtatcttttatgaagaagaattatctaaaagagaaggaatacatgcaaatgaaataaaaaatcttaagaaagaactgcatgattcagaaggtcagcaacttgctctcaacaaagaaattatgattttaaaagacaaattggaaaaaaccagaagagaaagtcaaagtgaaagggaggaatttgaaagtgagttcaaacaacaatatgaacgagaaaaagtgttgttaactgaagaaaataaaaagctgacgagtgaacttgataagcttactactttgtatgagaacttaagtatacacaaccagcagttagaagaagaggttaaagatctagcagacaagaaagaatcagttgcacattgggaagcccaaatcacagaaataattcagtgggtcagcgatgaaaaggatgcacgagggtatcttcaggccttagcttctaaaatgactgaagaattggaggcattaagaaattccagcttgggtacacgagcaacagatatgccctggaaaatgcgtcgttttgcgaaactggatatgtcagctagactggagttgcagtcggctctggatgcagaaataagagccaaacaggccatccaagaagagttgaataaagttaaagcatctaatatcataacagaatgtaaactaaaagattcagagaagaagaacttggaactactctcagaaatcgaacagctgataaaggacactgaagagcttagatctgaaaagggtatagagcaccaagactcacagcattctttcttggcatttttgaatacgcctaccgatgctctggatcaatttgaaactgtagactccactccactttcagttcacacaccaaccttaaggaaaaaaggatgtcctggttcaactggctttccacctaagcgcaagactcaccagttttttgtaaaatcttttactactcctaccaagtgtcatcagtgtacctccttgatggtgggtttaataagacagggctgttcatgtgaagtgtgtggattctcatgccatataacttgtgtaaacaaagctccaaccacttgtccagttcctcctgaacagacaaaaggtcccctgggtatagatcctcagaaaggaataggaacagcatatgaaggtcatgtcaggattcctaagccagctggagtgaagaaagggtggcagagagcactggctatagtgtgtgacttcaaactctttctgtacgatattgctgaaggaaaagcatctcagcccagtgttgtcattagtcaagtgattgacatgagggatgaagaattttctgtgagttcagtcttggcttctgatgttatccatgcaagtcggaaagatataccctgtatatttagggtcacagcttcccagctctcagcatctaataacaaatgttcaatcctgatgctagcagacactgagaatgagaagaataagtgggtgggagtgctgagtgaattgcacaagattttgaagaaaaacaaattcagagaccgctcagtctatgttcccaaagaggcttatgacagcactctacccctcattaaaacaacccaggcagccgcaatcatagatcatgaaagaattgctttgggaaacgaagaagggttatttgttgtacatgtcaccaaagatgaaattattagagttggtgacaataagaagattcatcagattgaactcattccaaatgatcagcttgttgctgtgatctcaggacgaaatcgtcatgtacgactttttcctatgtcagcattggatgggcgagagaccgatttttacaagctgtcagaaactaaagggtgtcaaaccgtaacttctggaaaggtgcgccatggagctctcacatgcctgtgtgtggctatgaaaaggcaggtcctctgttatgaactatttcagagcaagacccgtcacagaaaatttaaagaaattcaagtcccatataatgtccagtggatggcaatcttcagtgaacaactctgtgtgggattccagtcaggatttctaagataccccttgaatggagaaggaaatccatacagtatgctccattcaaatgaccatacactatcatttattgcacatcaaccaatggatgctatctgcgcagttgagatctccagtaaagaatatctgctgtgttttaacagcattgggatatacactgactgccagggccgaagatctagacaacaggaattgatgtggccagcaaatccttcctcttgttgttacaatgcaccatatctctcggtgtacagtgaaaatgcagttgatatctttgatgtgaactccatggaatggattcagactcttcctctcaaaaaggttcgacccttaaacaatgaaggatcattaaatcttttagggttggagaccattagattaatatatttcaaaaataagatggcagaaggggacgaactggtagtacctgaaacatcagataatagtcggaaacaaatggttagaaacattaacaataagcggcgttattccttcagagtcccagaagaggaaaggatgcagcagaggagggaaatgctacgagatccagaaatgagaaataaattaatttctaatccaactaattttaatcacatagcacacatgggtcctggagatggaatacagatcctgaaagatctgcccatgaaccctcggcctcaggaaagtcggacagtattcagtggctcagtcagtattccatctatcaccaaatcccgccctgagccaggccgctccatgagtgctagcagtggcttgtcagcaaggtcatccgcacagaatggcagcgcattaaagagggaattctctggaggaagctacagtgccaagcggcagcccatgccctccccgtcagagggctctttgtcctctggaggcatggaccaaggaagtgatgccccagcgagggactttgacggagaggactctgactctccgaggcattccacagcttccaacagttccaacctaagcagccccccaagcccagcttcaccccgaaaaaccaagagcctctccctggagagcactgaccgcgggagctgggacccgtgagctgcctcagcactgggacctctcgctctccgctccctgccactcgcctcctctcactttcatctcttccctccacctcgcctgctcggcctgaaagccaccaggggctggcagcagtagcaggacagggattcaggagttctgacgacacgactctcagatccacgcccccagcctaacagcaacaacaaagacagactttccgtagcagcttagattaacgttgatttcattccatgcacttagagttgctttcagtaacattttacccctactcccaaaggtagcttaaatagacagattacacaaatgtaagtgataagaataagattagacagattttgctttcacagtagagtctcattatagtcctaaaatagctcatgggcttctccgcatccagaagggagaattggtccctggagtggctcactaagctcttaatcagcaaacgcagtgagtatcaacctgattgttgccaggaaatccttatgaattaaaacaatgcatattttactacagtacagagtttaaatgaatacataaatgtagaagtactgaatgtatatatttaaaaggagcctcttgtattcaacaaaagatggatgcatatataagagagatgatttaatttaaagaaatatgttgtttcttgtctgtaatgtaatgtaaagggtggaaaggcctcaagctcacatttgtagagagagagcgagagaaatcagagttccctttattgccctgtcctcaaactggtcataggctctagtcacctggggagctgtagaaaacacttgcagagccaggttttgctggtttggggcatgccctgggcaccagagctttaacatttgaagccacttcagcagcagcagcaaaaggcgaactcatctctacccaagatgtttcttttcctagtggtggaatttgaacacttctcactttttattgtattttatcttccgcagataaatgtagaaatacacgattctgtcacctctgatcccttccatctgaaaggttacaaggagtgttgtagcttctgaaggtgcagaaaacaatttctaaaaatgcttttattcctgggctaatcctgtccctccctaagtcacagcgaggtgtctgtcccagggctggagatgcttcccaaggaggagtctgttttgttgagagtgggcgtgggcttcttcacataagcctggggaaggaagaaaaaacggctttcattaccaaataatgtaaaacctcaaaagcaagggcttcaacagccttaaccaaatattattccccatagccagtggaaaatggatgtgacaaccccagtgcgcaggccagagtgagtgagcccagcacggcgctccgactggcttcctctctcaggtgctggattgtggggttagtggcatttccagctggattcctcctgttgtagttgccataaggaaatgagatgcagaatcagaaggatctatttctacagaatcatttcaccagttaagcacatgagtagagaaagagataaaaataaaagtatctcatgaaggaaagagattttgcctctcttttacttttcacctaagtttctctgagaaatagagacaggattctctctttaaaattcagtgaaaatgaagaaagttttcctgcagttgctaacctgagttgcagtgtttaaggccatcatttcactgctgctgtctgtgactccacgtctgtgtcactgaggtgacctgcgtgtcactgaggtggccaccatgctggcctgcggcatgtgcagggagctgaggctgtttccaggtgatgctgctgtgtggagaaggttctgagatgcagtgagggaagaaaggatcctgctggggattccattgtaagcacctataatcgggaattttcatgtaacagctttgacatttaaa

SEQ ID NO: 220 - DNA, 8019 bp, Homo sapiens
gcggcccggtgcgggtgtcggggagaccgggctctctgcccggcgcggcgcggcgcggctcggcccacgagcgaccaccgacatggagtgggctcgggcggccaagtagccgcttctccggagcccggtgccagtgccgcccgcagcccgccttccacccccggccgcgccgccggtcaggccctagggtgaagccgggaggaaaatgaagagttttcaccggaatccgttgaaaataggactgactgcaaagccttaaagaaagaaggacctcgggaggagaaacgaaaagccgcctccgggcaagacttggcgtgctccgagccgaggggctgcttcagggacctcgccccctccctttcccgctggagaaattgccgctgatgcattatccaagtggtggttgggaggatttgcagcaacatttttggttttccctcccccttctatgcattctgtttttttcctcccttttctgtttttcttcttcccgggaagtgaattgctgatgcaaatcggactttattcattaatgatgcaaccggattcgtttcaggattacgttgcacgagttgaattttgaatgaaggagaagagtttttttttttttttttaaagaagtgttgactctctagttcgttgtacttttaattattattttatttaaatatacgacttaattgtattcttttaaaaatgcattaagtatatattttatggtaatttaccctcaaaatatatgtatatgggtgaaattgaagacgcttcagttaagtgaggttactggtgtgttggatgtttaattcagcaccagcattgcatgacagttgtttgaataacaagtggtttatttttaaaaccataccttttaaaatttaggttcagataatagtaaaagtcatcataataatttaaaggaaaaccagcagaaatcgaagcaaacatgtctggagaagtgcgtttgaggcagttggagcagtttattttggacgggcccgctcagaccaatgggcagtgcttcagtgtggagacattactggatatactcatctgcctttatgatgaatgcaataattctccattgagaagagagaagaacattctcgaatacctagaatgggctaaaccatttacttctaaagtgaaacaaatgcgattacatagagaagactttgaaatattaaaggtgattggtcgaggagcttttggggaggttgctgtagtaaaactaaaaaatgcagataaagtgtttgccatgaaaatattgaataaatgggaaatgctgaaaagagctgagacagcatgttttcgtgaagaaagggatgtattagtgaatggagacaataaatggattacaaccttgcactatgctttccaggatgacaataacttatacctggttatggattattatgttggtggggatttgcttactctactcagcaaatttgaagatagattgcctgaagatatggctagattttacttggctgagatggtgatagcaattgactcagttcatcagctacattatgtacacagagacattaaacctgacaatatactgatggatatgaatggacatattcggttagcagattttggttcttgtctgaagctgatggaagatggaacggttcagtcctcagtggctgtaggaactccagattatatctctcctgaaatccttcaagccatggaagatggaaaagggagatatggacctgaatgtgactggtggtctttgggggtctgtatgtatgaaatgctttacggagaaacaccattttatgcagaatcgctggtggagacatacggaaaaatcatgaaccacaaagagaggtttcagtttccagcccaagtgactgatgtgtctgaaaatgctaaggatcttattcgaaggctcatttgtagcagagaacatcgacttggtcaaaatggaatagaagactttaagaaacacccatttttcagtggaattgattgggataatattcggaactgtgaagcaccttatattccagaagttagtagcccaacagatacatcgaattttgatgtagatgatgattgtttaaaaaattctgaaacgatgcccccaccaacacatactgcattttctggccaccatctgccatttgttggttttacatatactagtagctgtgtactttctgatcggagctgtttaagagttacggctggtcccacctcactggatcttgatgttaatgttcagaggactctagacaacaacttagcaactgaagcttatgaaagaagaattaagcgccttgagcaagaaaaacttgaactcagtagaaaacttcaagagtcaacacagactgtccaagctctgcagtattcaactgttgatggtccactaacagcaagcaaagatttagaaataaaaaacttaaaagaagaaattgaaaaactaagaaaacaagtaacagaatcaagtcatttggaacagcaacttgaagaagctaatgctgtgaggcaagaactagatgatgcttttagacaaatcaaggcttatgaaaaacaaatcaaaacgttacaacaagaaagagaagatctaaataaggaactagtccaggctagtgagcgattaaaaaaccaatccaaagagctgaaagacgcacactgtcagaggaaactggccatgcaggaattcatggagatcaatgagcggctaacagaattgcacacccaaaaacagaaacttgctcgccatgtccgagataaggaagaagaggtggacctggtgatgcaaaaagttgaaagcttaaggcaagaactgcgcagaacagaaagagccaaaaaagagctggaagttcatacagaagctctagctgctgaagcatctaaagacaggaagctacgtgaacagagtgagcactattctaagcaactggaaaatgaattggagggactgaagcaaaaacaaattagttactcaccaggagtatgcagcatagaacatcagcaagagataaccaaactaaagactgatttggaaaagaaaagtatcttttatgaagaagaattatctaaaagagaaggaatacatgcaaatgaaataaaaaatcttaagaaagaactgcatgattcagaaggtcagcaacttgctctcaacaaagaaattatgattttaaaagacaaattggaaaaaaccagaagagaaagtcaaagtgaaagggaggaatttgaaagtgagttcaaacaacaatatgaacgagaaaaagtgttgttaactgaagaaaataaaaagctgacgagtgaacttgataagcttactactttgtatgagaacttaagtatacacaaccagcagttagaagaagaggttaaagatctagcagacaagaaagaatcagttgcacattgggaagcccaaatcacagaaataattcagtgggtcagcgatgaaaaggatgcacgagggtatcttcaggccttagcttctaaaatgactgaagaattggaggcattaagaaattccagcttgggtacacgagcaacagatatgccctggaaaatgcgtcgttttgcgaaactggatatgtcagctagactggagttgcagtcggctctggatgcagaaataagagccaaacaggccatccaagaagagttgaataaagttaaagcatctaatatcataacagaatgtaaactaaaagattcagagaagaagaacttggaactactctcagaaatcgaacagctgataaaggacactgaagagcttagatctgaaaagggtatagagcaccaagactcacagcattctttcttggcatttttgaatacgcctaccgatgctctggatcaatttgaaactgtagactccactccactttcagttcacacaccaaccttaaggaaaaaaggatgtcctggttcaactggctttccacctaagcgcaagactcaccagttttttgtaaaatcttttactactcctaccaagtgtcatcagtgtacctccttgatggtgggtttaataagacagggctgttcatgtgaagtgtgtggattctcatgccatataacttgtgtaaacaaagctccaaccacttgtccagttcctcctgaacagacaaaaggtcccctgggtatagatcctcagaaaggaataggaacagcatatgaaggtcatgtcaggattcctaagccagctggagtgaagaaagggtggcagagagcactggctatagtgtgtgacttcaaactctttctgtacgatattgctgaaggaaaagcatctcagcccagtgttgtcattagtcaagtgattgacatgagggatgaagaattttctgtgagttcagtcttggcttctgatgttatccatgcaagtcggaaagatataccctgtatatttagggtcacagcttcccagctctcagcatctaataacaaatgttcaatcctgatgctagcagacactgagaatgagaagaataagtgggtgggagtgctgagtgaattgcacaagattttgaagaaaaacaaattcagagaccgctcagtctatgttcccaaagaggcttatgacagcactctacccctcattaaaacaacccaggcagccgcaatcatagatcatgaaagaattgctttgggaaacgaagaagggttatttgttgtacatgtcaccaaagatgaaattattagagttggtgacaataagaagattcatcagattgaactcattccaaatgatcagcttgttgctgtgatctcaggacgaaatcgtcatgtacgactttttcctatgtcagcattggatgggcgagagaccgatttttacaagctgtcagaaactaaagggtgtcaaaccgtaacttctggaaaggtgcgccatggagctctcacatgcctgtgtgtggctatgaaaaggcaggtcctctgttatgaactatttcagagcaagacccgtcacagaaaatttaaagaaattcaagtcccatataatgtccagtggatggcaatcttcagtgaacaactctgtgtgggattccagtcaggatttctaagataccccttgaatggagaaggaaatccatacagtatgctccattcaaatgaccatacactatcatttattgcacatcaaccaatggatgctatctgcgcagttgagatctccagtaaagaatatctgctgtgttttaacagcattgggatatacactgactgccagggccgaagatctagacaacaggaattgatgtggccagcaaatccttcctcttgttgttacaatgcaccatatctctcggtgtacagtgaaaatgcagttgatatctttgatgtgaactccatggaatggattcagactcttcctctcaaaaaggttcgacccttaaacaatgaaggatcattaaatcttttagggttggagaccattagattaatatatttcaaaaataagatggcagaaggggacgaactggtagtacctgaaacatcagataatagtcggaaacaaatggttagaaacattaacaataagcggcgttattccttcagagtcccagaagaggaaaggatgcagcagaggagggaaatgctacgagatccagaaatgagaaataaattaatttctaatccaactaattttaatcacatagcacacatgggtcctggagatggaatacagatcctgaaagatctgcccatgaaccctcggcctcaggaaagtcggacagtattcagtggctcagtcagtattccatctatcaccaaatcccgccctgagccaggccgctccatgagtgctagcagtggcttgtcagcaaggtcatccgcacagaatggcagcgcattaaagagggaattctctggaggaagctacagtgccaagcggcagcccatgccctccccgtcagagggctctttgtcctctggaggcatggaccaaggaagtgatgccccagcgagggactttgacggagaggactctgactctccgaggcattccacagcttccaacagttccaacctaagcagccccccaagcccagcttcaccccgaaaaaccaagagcctctccctggagagcactgaccgcgggagctgggacccgtgagctgcctcagcactgggacctctcgctctccgctccctgccactcgcctcctctcactttcatctcttccctccacctcgcctgctcggcctgaaagccaccaggggctggcagcagtagcaggacagggattcaggagttctgacgacacgactctcagatccacgcccccagcctaacagcaacaacaaagacagactttccgtagcagcttagattaacgttgatttcattccatgcacttagagttgctttcagtaacattttacccctactcccaaaggtagcttaaatagacagattacacaaatgtaagtgataagaataagattagacagattttgctttcacagtagagtctcattatagtcctaaaatagctcatgggcttctccgcatccagaagggagaattggtccctggagtggctcactaagctcttaatcagcaaacgcagtgagtatcaacctgattgttgccaggaaatccttatgaattaaaacaatgcatattttactacagtacagagtttaaatgaatacataaatgtagaagtactgaatgtatatatttaaaaggagcctcttgtattcaacaaaagatggatgcatatataagagagatgatttaatttaaagaaatatgttgtttcttgtctgtaatgtaatgtaaagggtggaaaggcctcaagctcacatttgtagagagagagcgagagaaatcagagttccctttattgccctgtcctcaaactggtcataggctctagtcacctggggagctgtagaaaacacttgcagagccaggttttgctggtttggggcatgccctgggcaccagagctttaacatttgaagccacttcagcagcagcagcaaaaggcgaactcatctctacccaagatgtttcttttcctagtggtggaatttgaacacttctcactttttattgtattttatcttccgcagataaatgtagaaatacacgattctgtcacctctgatcccttccatctgaaaggttacaaggagtgttgtagcttctgaaggtgcagaaaacaatttctaaaaatgcttttattcctgggctaatcctgtccctccctaagtcacagcgaggtgtctgtcccagggctggagatgcttcccaaggaggagtctgttttgttgagagtgggcgtgggcttcttcacataagcctggggaaggaagaaaaaacggctttcattaccaaataatgtaaaacctcaaaagcaagggcttcaacagccttaaccaaatattattccccatagccagtggaaaatggatgtgacaaccccagtgcgcaggccagagtgagtgagcccagcacggcgctccgactggcttcctctctcaggtgctggattgtggggttagtggcatttccagctggattcctcctgttgtagttgccataaggaaatgagatgcagaatcagaaggatctatttctacagaatcatttcaccagttaagcacatgagtagagaaagagataaaaataaaagtatctcatgaaggaaagagattttgcctctcttttacttttcacctaagtttctctgagaaatagagacaggattctctctttaaaattcagtgaaaatgaagaaagttttcctgcagttgctaacctgagttgcagtgtttaaggccatcatttcactgctgctgtctgtgactccacgtctgtgtcactgaggtgacctgcgtgtcactgaggtggccaccatgctggcctgcggcatgtgcagggagctgaggctgtttccaggtgatgctgctgtgtggagaaggttctgagatgcagtgagggaagaaaggatcctgctggggattccattgtaagcacctataatcgggaattttcatgtaacagctttgacatttaaa

SEQ ID NO: 221 - DNA, 2150 bp, Homo sapiens; identical to SEQ ID NO: 132

SEQ ID NO: 222 - DNA, 3916 bp, Homo sapiens
agagtgctgatttagaagaatacaaatcatggctgaaaatagtgtattaacatccactactgggaggactagcttggcagactcttccatttttgattctaaagttactgagatttccaaggaaaacttacttattggatctacttcatatgtagaagaagagatgcctcagattgaaacaagagtgatattggttcaagaagctggaaaacaagaagaacttataaaagccttaaaggacattaaagtgggctttgtaaagatggagtcagtggaagaatttgaaggtttggattctccggaatttgaaaatgtatttgtagtcacggactttcaggattctgtctttaatgacctctacaaggctgattgtagagttattggaccaccagttgtattaaattgttcacaaaaaggagagcctttgccattttcatgtcgcccgttgtattgtacaagtatgatgaatctagtactatgctttactggatttaggaaaaaagaagaactagtcaggttggtgacattggtccatcacatgggtggagttattcgaaaagactttaattcaaaagttacacatttggtggcaaattgtacacaaggagaaaaattcagggttgctgtgagtctaggtactccaattatgaagccagaatggatttataaagcttgggaaaggcggaatgaacaggatttctatgcagcagttgatgactttagaaatgaatttaaagttcctccatttcaagattgtattttaagtttcctgggattttcagatgaagagaaaaccaatatggaagaaatgactgaaatgcaaggaggtaaatatttaccgcttggagatgaaagatgcactcaccttgtagttgaagagaatatagtaaaagatcttccctttgaaccttcaaagaaactttatgttgtcaagcaagagtggttctggggaagcattcaaatggatgcccgagctggagaaactatgtatttatatgaaaaggcaaatactcctgagctcaagaaatcagtgtcaatgctttctctaaatacccctaacagcaatcgcaaacgacgtcgtttaaaagaaacacttgctcagctttcaagagagacagacgtgtcaccatttccaccccgtaagcgcccatcagctgagcattccctttccatagggtcactcctagatatctccaacacaccagagtctagcattaactatggagacaccccaaagtcttgtactaagtcttctaaaagctccactccagttccttcaaagcagtcagcaaggtggcaagttgcaaaagagctttatcaaactgaaagtaattatgttaatatattggcaacaattattcagttatttcaagtaccattggaagaggaaggacaacgtggtggacctatccttgcaccagaggagattaagactatttttggtagcatcccagatatctttgatgtacacactaagataaaggatgatcttgaagaccttatagttaattgggatgagagcaaaagcattggtgacatttttctgaaatattcaaaagatttggtaaaaacctaccctccctttgtaaacttctttgaaatgagcaaggaaacaattattaaatgtgaaaaacagaaaccaagatttcatgcttttctcaagataaaccaagcaaaaccagaatgtggacggcagagccttgttgaacttcttatccgaccagtacagaggttacccagtgttgcattacttttaaatgatcttaagaagcatacagctgatgaaaatccagacaaaagcactttagaaaaagctattggatcactgaaggaagtaatgacgcatattaatgaggataagagaaaaacagaagctcaaaagcaaatttttgatgttgtttatgaagtagatggatgcccagctaatcttttatcttctcaccgaagcttagtacagcgggttgaaacaatttctctaggtgagcacccctgtgacagaggagaacaagtaactctcttcctcttcaatgattgcctagagatagcaagaaaacggcacaaggttattggcacttttaggagtcctcatggccaaacccgacccccagcttctcttaagcatattcacctaatgcctctttctcagattaagaaggtattggacataagagagacagaagattgccataatgcttttgccttgcttgtgaggccaccaacagagcaggcaaatgtgctactcagtttccagatgacatcagatgaacttccaaaagaaaactggctaaagatgctgtgtcgacatgtagctaacaccatttgtaaagcagatgctgagaatcttatttatactgctgatccagaatcctttgaagtaaatacaaaagatatggacagtacattgagtagagcatcaagagcaataaaaaagacttcaaaaaaggttacaagagcattctctttctccaaaactccaaaaagagctcttcgaagggctcttatgacatcccacggctcagtggagggaagaagtccttccagcaatgataagcatgtaatgagtcgtctttctagcacatcatcattagcaggtatcccttctccctcccttgtcagccttccttccttctttgaaaggagaagtcatacgttaagtagatctacaactcatttgatatgaagcgttaccaaaatcttaaattatagaaatgtatagacacctcatactcaaataagaaactgacttaaatggtacttgtaattagcacttggtgaaagctggaaggaagataaataacactaaactatgctatttgatttttcttcttgaaagagtaaggtttacctgttacattttcaagttaattcatgtaaaaaatgatagtgattttgatgtaatttatctcttgtttgaatctgtcattcaaaggccaataatttaagttgctatcagctgatattagtagctttgcaaccctgatagagtaaataaattttatgggcgggtgccaaatactgctgtgaatctatttgtatagtatccatgaatgaatttatggaaatagatatttgtgcagctcaatttatgcagagattaaatgacatcataatactggatgaaaacttgcatagaattctgattaaatagtgggtctgtttcacatgtgcagtttgaagtatttaaataaccactcctttcacagtttattttcttctcaagcgttttcaagatctagcatgtggattttaaaagatttgccctcattaacaagaataacatttaaaggagattgtttcaaaatatttttgcaaattgagataaggacagaaagattgagaaacattgtatattttgcaaaaacaagatgtttgtagctgtttcagagagagtacggtatatttatggtaattttatccactagcaaatcttgatttagtttgatagtgtgtggaattttattttgaaggataagaccatgggaaaattgtggtaaagactgtttgtacccttcatgaaataattctgaagttgccatcagttttactaatcttctgtgaaatgcatagatatgcgcatgttcaactttttattgtggtcttataattaaatgtaaaattgaaaattcatttgctgtttcaaagtgtgatatctttcacaatagcctttttatagtcagtaattcagaataatcaagttcatatggataaatgcatttttatttcctatttctttagggagtgctacaaatgtttgtcacttaaatttcaagtttctgttttaatagttaactgactatagattgttttctatgccatgtatgtgccacttctgagagtagtaaatgactctttgctacattttaaaagcaattgtattagtaagaactttgtaaataaatacctaaaacccaagtgt

SEQ ID NO: 223 - DNA, 2457 bp, Homo sapiens
gagggccggccggtttggcggcggctgcggagggtatctgaggctcggctgccaagccgaacgggctctggctcctcccagtggccggccggggcggaagcaggaggcgggggcagcgtgcgcgctgctggtcttctctcccgcggcgctggggcccgcgctccgctgctgttgctccattcggcgcttttctggcggctggctcctctccgctgccggctgctcctcgaccaggcctccttctcaacctcagcccgcggcgccgacccttccggcaccctcccgccccgtctcgtactgtcgccgtcaccgccgcggctccggccctggccccgatggctctgtgcaacggagactccaagctggagaatgctggaggagaccttaaggatggccaccaccactatgaaggagctgttgtcattctggatgctggtgctcagtacgggaaagtcatagaccgaagagtgagggaactgttcgtgcagtctgaaattttccccttggaaacaccagcatttgctataaaggaacaaggattccgtgctattatcatctctggaggacctaattctgtgtatgctgaagatgctccctggtttgatccagcaatattcactattggcaagcctgttcttggaatttgctatggtatgcagatgatgaataaggtatttggaggtactgtgcacaaaaaaagtgtcagagaagatggagttttcaacattagtgtggataatacatgttcattattcaggggccttcagaaggaagaagttgttttgcttacacatggagatagtgtagacaaagtagctgatggattcaaggttgtggcacgttctggaaacatagtagcaggcatagcaaatgaatctaaaaagttatatggagcacagttccaccctgaagttggccttacagaaaatggaaaagtaatactgaagaatttcctttatgatatagctggatgcagtggaaccttcaccgtgcagaacagagaacttgagtgtattcgagagatcaaagagagagtaggcacgtcaaaagttttggttttactcagtggtggagtagactcaacagtttgtacagctttgctaaatcgtgctttgaaccaagaacaagtcattgctgtgcacattgataatggctttatgagaaaacgagaaagccagtctgttgaagaggccctcaaaaagcttggaattcaggtcaaagtgataaatgctgctcattctttctacaatggaacaacaaccctaccaatatcagatgaagatagaaccccacggaaaagaattagcaaaacgttaaatatgaccacaagtcctgaagagaaaagaaaaatcattggggatacttttgttaagattgccaatgaagtaattggagaaatgaacttgaaaccagaggaggttttccttgcccaaggtactttacggcctgatctaattgaaagtgcatcccttgttgcaagtggcaaagctgaactcatcaaaacccatcacaatgacacagagctcatcagaaagttgagagaggagggaaaagtaatagaacctctgaaagattttcataaagatgaagtgagaattttgggcagagaacttggacttccagaagagttagtttccaggcatccatttccaggtcctggcctggcaatcagagtaatatgtgctgaagaaccttatatttgtaaggactttcctgaaaccaacaatattttgaaaatagtagctgatttttctgcaagtgttaaaaagccacataccctattacagagagtcaaagcctgcacaacagaagaggatcaggagaagctgatgcaaattaccagtctgcattcactgaatgccttcttgctgccaattaaaactgtaggtgtgcagggtgactgtcgttcctacagttacgtgtgtggaatctccagtaaagatgaacctgactgggaatcacttatttttctggctaggcttatacctcgcatgtgtcacaacgttaacagagttgtttatatatttggcccaccagttaaagaacctcctacagatgttactcccactttcttgacaacaggggtgctcagtactttacgccaagctgattttgaggcccataacattctcagggagtctgggtatgctgggaaaatcagccagatgccggtgattttgacaccattacattttgatcgggacccacttcaaaagcagccttcatgccagagatctgtggttattcgaacctttattactagtgacttcatgactggtatacctgcaacacctggcaatgagatccctgtagaggtggtattaaagatggtcactgagattaagaagattcctggtatttctcgaattatgtatgacttaacatcaaagcccccaggaactactgagtgggagtaataaacttcttgttctattaaagtaccgtgtgcagtttaaa

SEQ ID NO: 224 - DNA, 1728 bp, Homo sapiens
cgggaagtaggcggggtgacgtgtggttgacgagctcggcggcgggtttgctgagatctgtggccggcggcagctggtgcggggggcagctgagagcgagaggtggatcggggcggtgtgtggccagggccatgacgggcaacgccggggagtggtgcctcatggaaagcgaccccggggtcttcaccgagctcattaaaggattcggttgccgaggagcccaagtagaagaaatatggagtttagagcctgagaattttgaaaaattaaagccagttcatgggttaatttttcttttcaagtggcagccaggagaagaaccagcaggctctgtggttcaggactcccgacttgacacgatattttttgctaagcaggtaattaataatgcttgtgctactcaagccatagtgagtgtgttactgaactgtacccaccaggatgtccatttaggcgagacattatcagagtttaaagaattttcacaaagttttgatgcagctatgaaaggcttggcactgagcaattcagatgtgattcgacaagtacacaacagtttcgccagacagcaaatgtttgaatttgatacgaagacatcagcaaaagaagaagatgcttttcactttgtcagttatgttcctgttaatgggagactgtatgaattagatggattaagagaaggaccgattgatttaggtgcatgcaatcaagatgattggatcagtgcagtaaggcctgtcatagaaaaaaggatacaaaagtacagtgaaggtgaaattcgatttaatttaatggccattgtgtctgacagaaaaatgatatatgagcagaagatagcagagttacaaagacaacttgcagaggaggaacccatggatacagatcaaggtaatagtatgttaagtgctattcagtcagaagttgccaaaaatcagatgcttattgaagaagaagtacagaaattaaaaagatacaagattgagaatatcagaaggaagcataattatctgcctttcattatggaattgttaaagactttagcagaacaccagcagttaataccactagtagaaaaggcaaaagaaaaacagaacgcaaagaaagctcaggaaaccaaatgaagatgttttcagatatgtacacatttctgcttctgcacatattttcatggaaaccattatgtataaagaacttagagcaacatcctaattggctcagtgcacgtttggcaatagtgccagcctgtcttgtctttaatgcatggattcataaacttcttccctacctgcatcatgtgcatgtagtgcatattaaatgaaagtgatattaagaatgctttcccaaattccattatttgacattgagtctgacaactgttagttttctggttgtccaactaccatatgaagctagaaaatgcacaaacgatattccttatctgtaatttaaatacttaaaatttgcaattgtcagatcttgattaaactggttgtcttatttcttctcatcattaacggaaaaaaaatcagtatttctatctttgatatctaagtgttttgaggattttaaaactgaattttatctgctataccagttatttgagaaagtatgattttaatgtaaatcatttaaaaaggacaaaagtataatttccagtgattttcactgctgtcagtagaaaagtaataaacatctcaattttaaaaaaaaaaaaaaaaaaaaaaaaaa

SEQ ID NO: 225 - DNA, 4687 bp, Homo sapiens
ggaagtgggtgtgacggggacgggggcccggtgggcccgcggaggaaagatactggggagtgggagccgcggggttcagagcgatgattcccccacaggaggcatccgctcgacggcgggagattgaggacaagctgaagcaggaggaggagactctgtccttcatccgagacagcctggagaagagcgaccagctcactaagaacatggtgtctatcttatcatcctttgagagccgccttatgaagctggagaactccatcatccctgtgcacaagcagacggagaatctgcagcggctgcaggagaatgttgagaagacgctgtcctgcctggaccatgtcatcagctactaccatgtggccagtgacactgagaagatcatcagagagggccccacaggtaggctggaagagtacctgggaagcatggccaagattcagaaggcagtggagtatttccaggacaacagcccagacagcccggaactcaacaaagtgaaactgctctttgagcgcgggaaggaggccctggagtccgaatttcgcagcctgatgacgcggcacagtaaggtcgtctcgcccgtgctcatcttggatctgatcagtggtgacgatgatctggaggcccaggaggacgtgaccctggagcacctgcccgagagcgtgctccaggatgtcattcgcatctcccgctggctggtggaatatggccgcaaccaagatttcatgaacgtctactaccagatacgctccagccagctggaccgctccatcaaaggactgaaggagcatttccataagagcagttcttcctctggggttccctactcccctgctatccccaacaagaggaaagacacacctaccaagaagccagtcaagcggccagggagagatgacatgctggacgtggagaccgatgcctacatccactgcgtcagtgccttcgtcaagctggcgcagagcgagtaccagctgctggccgacatcatccccgagcaccaccagaagaagaccttcgactccctgatacaggatgccctggatgggctgatgcttgaaggggagaacatcgtgtctgctgcccggaaggccattgtgcgacacgacttctccacggtgctcaccgtcttccccatcctgcgacacctcaagcagaccaagcctgagtttgaccaggtgctccagggcacggctgccagcacaaagaacaagctgcctggcctcatcacatccatggagaccatcggtgccaaagcgctggaggacttcgcagacaacatcaagaatgacccggacaaggagtacaacatgccgaaggacggcaccgtacacgagctcaccagcaatgccatcctcttcctgcagcagcttttggacttccaggagacggcaggcgccatgctggcctcccaagagaccagctcttcggccaccagctacagctctgagttcagcaagcggctgctaagcacctatatctgtaaagtgctgggcaacctgcagttgaacttgctgagcaagtccaaggtgtacgaggacccagctctgagcgccatcttcctgcacaacaactacaattacatcctcaagtccctggagaagtctgaactgatccagctggtggcagtgacacagaagactgctgagcgctcctaccgggagcacattgagcagcagatccagacctaccagcgcagctggttaaaggtgactgattacatcgcagagaagaatctacctgtgttccagccgggagtcaagctccgggacaaggagcggcagattatcaaggagcgttttaagggcttcaatgatggcctcgaagaactgtgcaaaatccagaaggcctgggctattccagacacagagcagagggacaggattcgccaggcccagaagaccattgtcaaggagacctacggggcctttctacagaagtttggcagcgtgcccttcaccaagaacccggagaagtacatcaagtacggggtggagcaggtgggcgacatgatcgatcgccttttcgacacctctgcctgagcctgctgctagccctgcctggttccaccagactggcgtgtcattggacagataaaccagtgttagcttgcctctgggctgggtgagcttgaagtcctctgggacagagacctgtctccacgcctccgggagctgtgtccctgagccccctagtcctggctcctgctttttccccacagcccgtgttcccagccgaaccagcactctcccggaagcctggggtccctccacaccttggcttttatgaccctgatggcttctgaaacaggaaaagagagaaggaagacagaggcctgtgcccactgctgctccatgtgtaccaagagcagcagggcagaagggccctccctccagcctaggtcagaggtggggacagagaactcccctacagcccagagatgtggcagggctcagagaagcagccagagctcctggaggaaaggcagtcgggactgaccccctctcttaaaacacattcccgcccgcccacaggcctgaggtctgggacctttccctcccaggagtcccctaggtggctgggggaggcaggctcactggccattttccctagagtccagcacactgcaggaggcgttcggaggaggagttccgccccaccctctacagccttcctcaggcccctgtctctggcccccagcctcagtgcctcttggcccagggccaggcagtcgtggttgcagaaggagcaattaggctgcctgcctgtgggctgggagacagggacaatggggaaaagttaaggagcaaaatgggggttggaagcaaaaaatagggccccacctatttaggacgagattgaagactgacccttgaggcacacttgcactggagatgggtttatttcacgctctgtgcttgtgtgctagcggagggagagctcagggtggcttaatccagaggccctgtcatggcccgcccccagccatgggaaagcaaacttcatcctaaggtgtgcagcccaggccctgcccctttacagtctaggccgcctgccatggggtgcagcctctccaggggctgcgtcagacttgcacgctgcccacatccagattcctgcaaagacgaattgggtgcacagcaccccaaccacatacacgaggaagaagatgcggtcagcagtctcaggccagcttctctgtgacccctttactcctctggagggctctgtggggagagatacagggaaaggagctgttcttcaaggtcccctcaacatgagcggaagagcgaaccccaggggtcatcagcctgtatcgcttcctttcttagattctcagctgatgaaaatttgggtctggcccatttcaggccatcttcagttgaagaaacaccctcttaggctgtgcaaggcatgggttatcaggggattgaggtcacctgggacttcagggaggctcagcttgctccctgccccagacctgtttcttctaagggaggaggacatggtggagaccagggacaggagagccagcagggtggatgcaaggggcctctacccacacctggacctccgtgccctcaccccagccctaggtgtgcacctaggcctcattccttaccccccagcccctgcccaccttcagcaggatgaggccctgggttgccgtgctctcgctgttcccctctcggggctgggctggggccgctcttggccccaaggttgccccgggccagcagcccagccagcagcacagtctctatggtgctgaggaagagcagcagcagcaggatggtgaagtagtaaactgggggaggcagggcacagggagatgctcaggggccagtccctgtgtctctggtgcccagcgagctgagcaccagtgggtgaccggggagaaacagggcagactgggtaagggagcagggcttactgagcagtgggttgcaggaggaggagctgggcagggcctgcaccagggaggagtggaggacgaggtaactcagcagcaatgtcaccttgtagcctatgcgctcaatggcccggaggggcagcaaccccccgcacacgtcagccaacagcagtgcctctgcaggcaccaagagagcgatgatggacttgagcgccgtgttcttcagcctcagctggaaggggaaaagtcagggccttcccggcgggggggaaggaggtgggcatcgggggcatggggcctggcctctggccgtgcatcctcactcccacccgcctccagcagccctctgtcggcctcctcccgacttgactcaccgtcacctggaagcagggcaccagctgctggggtgggacttgggtcttcagatcataaactacgtattccctcttgacactcacaatctcgttcaccacgtgggcctggaactctaactccatcgctgaggggtgggaatgagaactatgaaccaggaaggagagatcccagctgccaagtctgggggtagcagactggagcccaggggtgatggagacttttgatggcttttggcagggacagacttggacacaaaaccgatccatagaagggcttcccaaaccttgttttgcaacatcccaaattgtctccagttgaaggaaggcctttatcagattcatagatgagctttcattgtaaaaataaatgtactttgcaccacttcatgatggaggg

SEQ ID NO: 226 - DNA, 4780 bp, Homo sapiens
ggaagtgggtgtgacggggacgggggcccggtgggcccgcggaggaaagatactggggagtgggagccgcggggttcagagcgatgattcccccacaggaggcatccgctcgacggcgggagattgaggacaagctgaagcaggaggaggagactctgtccttcatccgagacagcctggagaagagcgaccagctcactaagaacatggtgtctatcttatcatcctttgagagccgccttatgaagctggagaactccatcatccctgtgcacaagcagacggagaatctgcagcggctgcaggagaatgttgagaagacgctgtcctgcctggaccatgtcatcagctactaccatgtggccagtgacactgagaagatcatcagagagggccccacaggtaggctggaagagtacctgggaagcatggccaagattcagaaggcagtggagtatttccaggacaacagcccagacagcccggaactcaacaaagtgaaactgctctttgagcgcgggaaggaggccctggagtccgaatttcgcagcctgatgacgcggcacagtaaggtcgtctcgcccgtgctcatcttggatctgatcagtggtgacgatgatctggaggcccaggaggacgtgaccctggagcacctgcccgagagcgtgctccaggatgtcattcgcatctcccgctggctggtggaatatggccgcaaccaagatttcatgaacgtctactaccagatacgctccagccagctggaccgctccatcaaaggactgaaggagcatttccataagagcagttcttcctctggggttccctactcccctgctatccccaacaagaggaaagacacacctaccaagaagccagtcaagcggccagggacgatccgtaaggctcagaaccttctgaaacagtattcccagcatggtctagatgggaaaaaggggggctctaacctcattcctctggaagggagagatgacatgctggacgtggagaccgatgcctacatccactgcgtcagtgccttcgtcaagctggcgcagagcgagtaccagctgctggccgacatcatccccgagcaccaccagaagaagaccttcgactccctgatacaggatgccctggatgggctgatgcttgaaggggagaacatcgtgtctgctgcccggaaggccattgtgcgacacgacttctccacggtgctcaccgtcttccccatcctgcgacacctcaagcagaccaagcctgagtttgaccaggtgctccagggcacggctgccagcacaaagaacaagctgcctggcctcatcacatccatggagaccatcggtgccaaagcgctggaggacttcgcagacaacatcaagaatgacccggacaaggagtacaacatgccgaaggacggcaccgtacacgagctcaccagcaatgccatcctcttcctgcagcagcttttggacttccaggagacggcaggcgccatgctggcctcccaagagaccagctcttcggccaccagctacagctctgagttcagcaagcggctgctaagcacctatatctgtaaagtgctgggcaacctgcagttgaacttgctgagcaagtccaaggtgtacgaggacccagctctgagcgccatcttcctgcacaacaactacaattacatcctcaagtccctggagaagtctgaactgatccagctggtggcagtgacacagaagactgctgagcgctcctaccgggagcacattgagcagcagatccagacctaccagcgcagctggttaaaggtgactgattacatcgcagagaagaatctacctgtgttccagccgggagtcaagctccgggacaaggagcggcagattatcaaggagcgttttaagggcttcaatgatggcctcgaagaactgtgcaaaatccagaaggcctgggctattccagacacagagcagagggacaggattcgccaggcccagaagaccattgtcaaggagacctacggggcctttctacagaagtttggcagcgtgcccttcaccaagaacccggagaagtacatcaagtacggggtggagcaggtgggcgacatgatcgatcgccttttcgacacctctgcctgagcctgctgctagccctgcctggttccaccagactggcgtgtcattggacagataaaccagtgttagcttgcctctgggctgggtgagcttgaagtcctctgggacagagacctgtctccacgcctccgggagctgtgtccctgagccccctagtcctggctcctgctttttccccacagcccgtgttcccagccgaaccagcactctcccggaagcctggggtccctccacaccttggcttttatgaccctgatggcttctgaaacaggaaaagagagaaggaagacagaggcctgtgcccactgctgctccatgtgtaccaagagcagcagggcagaagggccctccctccagcctaggtcagaggtggggacagagaactcccctacagcccagagatgtggcagggctcagagaagcagccagagctcctggaggaaaggcagtcgggactgaccccctctcttaaaacacattcccgcccgcccacaggcctgaggtctgggacctttccctcccaggagtcccctaggtggctgggggaggcaggctcactggccattttccctagagtccagcacactgcaggaggcgttcggaggaggagttccgccccaccctctacagccttcctcaggcccctgtctctggcccccagcctcagtgcctcttggcccagggccaggcagtcgtggttgcagaaggagcaattaggctgcctgcctgtgggctgggagacagggacaatggggaaaagttaaggagcaaaatgggggttggaagcaaaaaatagggccccacctatttaggacgagattgaagactgacccttgaggcacacttgcactggagatgggtttatttcacgctctgtgcttgtgtgctagcggagggagagctcagggtggcttaatccagaggccctgtcatggcccgcccccagccatgggaaagcaaacttcatcctaaggtgtgcagcccaggccctgcccctttacagtctaggccgcctgccatggggtgcagcctctccaggggctgcgtcagacttgcacgctgcccacatccagattcctgcaaagacgaattgggtgcacagcaccccaaccacatacacgaggaagaagatgcggtcagcagtctcaggccagcttctctgtgacccctttactcctctggagggctctgtggggagagatacagggaaaggagctgttcttcaaggtcccctcaacatgagcggaagagcgaaccccaggggtcatcagcctgtatcgcttcctttcttagattctcagctgatgaaaatttgggtctggcccatttcaggccatcttcagttgaagaaacaccctcttaggctgtgcaaggcatgggttatcaggggattgaggtcacctgggacttcagggaggctcagcttgctccctgccccagacctgtttcttctaagggaggaggacatggtggagaccagggacaggagagccagcagggtggatgcaaggggcctctacccacacctggacctccgtgccctcaccccagccctaggtgtgcacctaggcctcattccttaccccccagcccctgcccaccttcagcaggatgaggccctgggttgccgtgctctcgctgttcccctctcggggctgggctggggccgctcttggccccaaggttgccccgggccagcagcccagccagcagcacagtctctatggtgctgaggaagagcagcagcagcaggatggtgaagtagtaaactgggggaggcagggcacagggagatgctcaggggccagtccctgtgtctctggtgcccagcgagctgagcaccagtgggtgaccggggagaaacagggcagactgggtaagggagcagggcttactgagcagtgggttgcaggaggaggagctgggcagggcctgcaccagggaggagtggaggacgaggtaactcagcagcaatgtcaccttgtagcctatgcgctcaatggcccggaggggcagcaaccccccgcacacgtcagccaacagcagtgcctctgcaggcaccaagagagcgatgatggacttgagcgccgtgttcttcagcctcagctggaaggggaaaagtcagggccttcccggcgggggggaaggaggtgggcatcgggggcatggggcctggcctctggccgtgcatcctcactcccacccgcctccagcagccctctgtcggcctcctcccgacttgactcaccgtcacctggaagcagggcaccagctgctggggtgggacttgggtcttcagatcataaactacgtattccctcttgacactcacaatctcgttcaccacgtgggcctggaactctaactccatcgctgaggggtgggaatgagaactatgaaccaggaaggagagatcccagctgccaagtctgggggtagcagactggagcccaggggtgatggagacttttgatggcttttggcagggacagacttggacacaaaaccgatccatagaagggcttcccaaaccttgttttgcaacatcccaaattgtctccagttgaaggaaggcctttatcagattcatagatgagctttcattgtaaaaataaatgtactttgcaccacttcatgatggaggg

SEQ ID NO: 227 - DNA, 3225 bp, Homo sapiens
gagggcgccgcggccccgtgctcgccgccccgccccgccccgccctgcccggagcagctcggcagatgctctgtgctgcggcccggaggtgaagggctggatgcacagtgggagccggaggcggggggctgcagggagcacaccagcgaccggccctccaaccctccagccactcagcaacatcgccacagcaaccagcaaccagacggcagcagccgaggcaaacacaagcggacggcttcccaccgtcgccgaggacagggaatgactacggcaaatcaggccactttgccaactagggaggtggagtgtcactagtggggaggggcggccaccgcccgctgcacagagcgccatgccggctggagaagaggcgctggggcaggggctgcagtgtggctcggcctcacccccctgctggcactgagtgcctccagggcagctgggctcttgtctgcctggtctcagtgtcccctgtggcaagagggagaggtgccccatcccgtgctccttgtctgggcccgctgctgccagaccatgggatgtcggcaaagctcagaggaaaaagaagcagcccggcggtcccggagaattgaccgccacctgcgctcagagagccagcggcaacgccgcgaaatcaagctgctcctgctgggcaccagcaactcaggcaagagcaccatcgtcaaacagatgaagatcatccacagcggcggcttcaacctggaggcctgcaaggagtacaagcccctcatcatctacaatgccatcgactcgctgacccgcatcatccgggccctggccgccctcaggatcgacttccacaaccccgaccgcgcctacgacgctgtgcagctctttgcgctgacgggccccgctgagagcaagggcgagatcacacccgagctgctgggtgtcatgcgacggctctgggccgacccaggggcacaggcctgcttcagccgctccagcgagtaccacctggaggacaacgcggcctactacctgaacgacctggagcgcatcgccgcagctgactatatccccactgtcgaggacatcctgcgctcccgggacatgaccacgggcattgtggagaacaagttcaccttcaaggagctcaccttcaagatggtggacgtgggggggcagaggtcagagcgcaaaaagtggatccactgcttcgagggcgtcacagccatcatcttctgtgtggagctcagcggctacgacctgaaactctacgaggataaccagacaagtcggatggcagagagcttgcgcctctttgactccatctgcaacaacaactggttcatcaacacctcactcatcctcttcctgaacaagaaggacctgctggcagagaagatccgccgcatcccgctcaccatctgctttcccgagtacaagggccagaacacgtacgaggaggccgctgtctacatccagcggcagtttgaagacctgaaccgcaacaaggagaccaaggagatctactcccacttcacctgcgccaccgacaccagtaacatccagtttgtcttcgacgcggtgacagacgtcatcatacagaacaatctcaagtacattggcctttgctgaggagctgggcccggggcccgcctgcctatggtgaaacccacggggtgtcatgccccaacgcgtgctagagaggcccaatccaggggcagaaaacagggggcctaaagaatgtcccccaccccttggcctctgcctccttggccccacatttctgcaaacataaatatttacggatagattgctaggtagatagacacacacacatgcacacacacacatctggagatggcaaaatcctctaaaatgtcgaggtctcttgaagacttgagaagctgtcacaaggtcactacaagcccaacctgccccttcactttgccttcctgagttggccccactccacttgggggtctgcattggattgttagggataggcagcagggctgaggcaaggtaggccaactgcacccctgtcgcctggaggagggccagctcgctgcccgagctctggcctagggaccttgccgctgaccaagagggaggaccagtgcagggtctgtgcaccttccctgctggcctgcacacagctgctcagcaccactttcattctggacctgggaccttaggagccgggtgacagcactaaccagacctccagccactcacagctctttttaaaaaacagcttcaaaatatgcagcaaaaaccaatacaacaaaacgagtggcacgatttatttcaaactaggccagctgggattccagcttttcttctactagtctgatgttttataaatcaaaacctggttttccttctctgacattttttttttgttttgttttttggtttttttttttttttggccaaatctcgtggtgtttcgcagaaaaaaatccagaaaatttcaaatgcagttgagtattcttttttaaatgcagattttcaaaacatattttttttcaggtggtcttttttgtgtctggcttgctgagtgtaaaagttgttatctggacgatctgtctctctgctccaaagaaattttggagtgagtggcagtcctgcgccagcctcgcgggacacgtgttgtacataagcctctgcagtgtcctcttgttaatggtggggttttctgctttgtttttatttaagaaaataaacacgacatatttaaagaaggttctttcacctgggagcaaatgaacaatagctaagtgtcttggtatttaaagagtaaattatttgtggctttgctgagtgaaggaaggggagcaaggggtggtgcccctggtcccagcatgccccgcgcctgagactggctggaaatgctctgactcctgtgaaggcacagccagcgttgtggcctgagggaggccctgctgggaccctgatctgggccttcctgtcccagggcctatgggcaactgcgttgaaaggacgttcgccaagggccgtgtgtaaatacgaactgcgccatggagaggagaggcactgccggagcccttgccagatctccctccctctctccgtgcagtagctgtgtgtccgaggtcagtgtgcggaatcacagccaaggacgtgaagagatgtacgggggaaagagaagctggggattggatgaaagtcaaaggttgtctactttaagaaaataaaataccctgaatggagcacaaaaaaaaaaaaaaa

SEQ ID NO: 228 - DNA, 1912 bp, Homo sapiens
ccggcggctgttgtcgggcctccagcgggcggggccgttggcggagcagagcggaggcgcagccgggcggagggcccacgagggctcagccttcccggtcagcggtggtgacggtatcccagagtgccagagaaccgttgcttttccgagttgctcttcttccaggctccgttggtggtcggcatggcccgtggaaatcaacgagaacttgcccgccagaaaaacatgaagaaaacccaggaaattagcaagggaaagaggaaagaggatagcttgactgcctctcagagaaagcagagttctggaggccagaaatctgagagcaagatgtcagctgggccacacctccctctgaaggctccaagggagaatccttgctttcctcttccagctgctggtggctccaggtattacttggcttatggcagcataactcctatctctgcctttgtctttgtggtcttcttttctgtcttcttcccttctttttatgaggacttttgctgttggatttaggttccattctaacctaggatgatctcatttggaaatccttaatttcatctacaaaaactgttttcccaaataggtcacattcacgcatatcagatggacagatgtatcattttggggtccaccattcaacccactacaaggagttttttaaacaaaaataggaaacttagatgtaacttagcactttttttttttttttttgagatggagtctcactctgtcaccagactggagtgcagtggcgccatctcagctccatgcaacctctgcctcctgggttcaagcagttctcttgcctcagcctcctgggtagctgggattacaggcacgcgctgccacacccaggtaatttatttattttttttttgagacagagtctcgcactgttgcccaggctggactgcagtggcgtgatctctgctcactgcaacctccgcctcccgggttcaagcgattctccagcctcagcttcctgagtagatgggattacaggcgcctgccaccacgcccagctaatttttttgtattcttagtagagatggggtttcaccatgttggccaggctggtctccatctcctgacctcgtgattcacccgcctcggcctcccaaagtgctgggattacaggcgtgagtcacagcccccggccataatttagcactttaaaaaataatagccatgttgggccaggcgtggtggctcatgcctgtaatctgagcactttgggagaccaaggcgggtagatcccttgtgcccaggagttcaagaccagcctgggcaacatggcgaaaccccatttctactaaaaatacaaaaattagctggggcgaggggataggccgagttccgggtgtaagggggccattagggagagcagagcgaggcagctgatcttccggattgggggccttgcccggaagctggacctcacggagatgaaacggaagatgcacgaggatatgatctccatacagaactttctcatctacgtggccctgctgcgagtcactccatttatcttaaagaaattggacagcatatgaagattggacatcacatgtgaatgcatgatatgaagagcctggttacagtttctactgttctctgcaagtaaataggcccagaaaggtataagagactctttgaatggacataaaaattctgcttgttaagaacaagttgagctctggtaactgatcttaatagctaaaatataaaaatatttgggaagtctgaaatgaggtctcctggccctggtgtgcccttaatgcctgtgacagttggcctctgtgaatattggtataattgtaaataatgtcaaactccattttctagcaagtattaataattaagggaagtatgtctgaaatggcaaaaaaaaaaaaaaaaaaaaaaa

SEQ ID NO: 229 - DNA, 3385 bp, Homo sapiens
ggtggcgtgcggctcgaaaggccgggaggacgtcatcgacgcgctgtcgagcctccagcccgcccgggtttccttcgcagtcgcgcaccgacgctcaaacgcgcgctccaacccgcagcctcctcctgcctcaccgcccgaagatggcggctctcaaactcctctcctccgggcttcggctctgcgcctctgcccgcggatctggggcaacctggtacaagggatgtgtttgttccttttccaccagtgctcatcgccataccaagttttatacagatccagtagaagctgtaaaagacatccctgatggtgccacggttttggttggtggttttgggctatgtggaattccagagaatcttatagatgctttactgaaaactggagtaaaaggactaactgcagtcagcaacaatgcaggggttgacaattttggtttggggcttttgcttcggtccaagcagataaaacgcatggtctcttcatatgtgggagaaaatgcagaatttgaacgacagtacttatctggtgaattagaagtggagctgacaccacagggcacacttgcagagaggatccgtgcaggcggggctggagttcctgcattttacaccccaacagggtatgggaccctggtacaagaaggaggatcgcccatcaaatacaacaaagatggcagtgttgccattgccagtaagccaagagaggtgagggagttcaatggtcagcactttattttggaggaagcaattacaggggattttgctttggtgaaagcctggaaggcggaccgagcaggaaacgtgattttcaggaaaagtgcaaggaatttcaacttgccaatgtgcaaagctgcagaaaccacagtggtagaggttgaagaaattgtggatattggagcatttgctccagaagacatccatattcctcagatttatgtacatcgccttataaagggagaaaaatatgagaaaagaattgagcgtttatcaatccggaaagagggagatggggaagccaaatctgctaaacctggagatgacgtaagggaacgaatcatcaagagggccgctcttgagtttgaggatggcatgtatgctaatttgggcataggaatccctctcctggccagcaattttatcagcccaaatataactgttcatcttcaaagtgaaaatggagttctgggtttgggtccatatccacgacaacatgaagctgatgcagatctcatcaatgcaggcaaggaaacagttactattcttccaggagcctcttttttctccagcgatgaatcatttgcaatgattagaggtggacacgtcgatctgacaatgctaggagcgatgcaggtttccaaatatggtgacctggctaactggatgatacctgggaagatggtgaaaggaatgggaggtgctatggatttagtgtccagtgcgaaaaccaaagtggtggtcaccatggagcattctgcaaagggaaatgcacataaaatcatggagaaatgtacattaccattgactggaaagcaatgtgtcaaccgcattattactgaaaaggctgtgtttgatgtggacaagaagaaagggttgactctgattgagctctgggaaggcctgacagtggatgacgtacagaagagtactgggtgtgattttgcagtttcaccaaaactcatgccaatgcagcagatcgcaaattgaaatatggatatttgtaccaggctgcgtgtttttcattttaaacacacaagatttaattgaaaggacatcaataatcataattgtgtatttaacaggtggttttttattagttttcttgtgtttcagactttatgcagccatataaactgttctctaggcatgctgtgacattttaataaaaagcaaaaggagcatttataattatctcatttgttaaggctgagaaggttgtttttataataggtaattatattgaatgcattttcactgaatatggtatgtatgctaaattatatgaacctttccccaagaagggccctagaaattgatgtggctttcctcttaaatattaattattagtcctgaaagaaagataacatatgtgatttttgtggttaggagagttgctgtcatgattgttttttcttcagcctcctctgacttttcttttggggcttcagattttatgattacatcttgtccccctagaacatcccccttcctcccatactgcttttaaacagatgcccaagaaggcaagcaggaatgcctcttgtgggggagggcagggagaaataactagttcaaaccaactatctatctatgctttgcaaagactaaggcgtattataggaagagggctagaaacctaactgattcttctcagttttctcattttaaaacagcccagtattcctttgtatcctcaagggtccttgagaatacttctgttattgagaccctgtgggctacttgtactgtacctcctctcaagccaagaagggctgtgggataatttaccatgaatccttagtagcaatgacagcagagttaaaaaataaaaggtgttttactttcaggctcttgttttggttcagaggagattttaaatattgaatgacacttctacagaacaacggtttttcttctgccaaggctacttcctttaacgaagtgcctttaattcagccttatccaactagggaaaataatgttggacaagtctaggatttgaagagtcagtgaacttttagtgtcagggaataaacatggtgggtagattaggtttgaaaaaaacttccttagaggtatttattctcaatacctgacaggggcccatgggaatgacttcagaagcatcccggataatagatgggtaaaaagtctaggcaccctgaagaacaggtgagacagctggcctctggacagaggtaggcatagtacagtacgatatatcattcctctggtcctaaatatacaaacttattcatgtttttaggtgatgatggtcattgaaactcacttcttttcaggtgtagctacaattgtgtaatgtacaatattagagaaaggacaggctttttatgagtaacacacaccatatataaaacagcctttctggctgaccacatggttaaatgcataccttcccagtactggggggaaaaaatgacccttcttagaatgtgcaagttccatgagagtaatatattgatatgattttgaaaagaattgttgatagttacatcttcaaacttatcattccagtatgcatctttaagataatgtgattctaagtagatgactttatattcttgattaaagagtgctatacatgttaagaaatgcattaaggaatacaataaatattctaaagtgatgtaaaaaaaaaaaaaaaa

SEQ ID NO: 230 - DNA, 1647 bp, Homo sapiens
gcgcgcgggtttcgttgacccgcggcgttcacgggaattgttcgctttagtgccggcgccatggggtcggagctgatcgggcgcctagccccgcgcctgggcctcgccgagcccgacatgctgaggaaagcagaggagtacttgcgcctgtcccgggtgaagtgtgtcggcctctccgcacgcaccacggagaccagcagtgcagtcatgtgcctggaccttgcagcttcctggatgaagtgccccttggacagggcttatttaattaaactttctggtttgaacaaggagacatatcagagctgtcttaaatcttttgagtgtttactgggcctgaattcaaatattggaataagagacctagctgtacagtttagctgtatagaagcagtgaacatggcttcaaagatactaaaaagctatgagtccagtcttccccagacacagcaagtggatcttgacttatccaggccacttttcacttctgctgcactgctttcagcatgcaagattctaaagctgaaagtggataaaaacaaaatggtagccacatccggtgtaaaaaaagctatatttgatcgactgtgtaaacaactagagaagattggacagcaggtcgacagagaacctggagatgtagctactccaccacggaagagaaagaagatagtggttgaagccccagcaaaggaaatggagaaggtagaggagatgccacataaaccacagaaagatgaagatctgacacaggattatgaagaatggaaaagaaaaattttggaaaatgctgccagtgctcaaaaggctacagcagagtgatttcagcttccaaactggtatacattccaaactgatagtacattgccatctccaggaagacttgacggctttgggattttgtttaaacttttataataaggatcctaagactgttgcctttaaatagcaaagcagcctacctggaggctaagtctgggcagtgggctggcccctggtgtgagcattagaccagccacagtgcctgattggtatagccttatgtgctttcctacaaaatggaattggaggccgggcgcagtggctcacgcctgtaatcccagcactttgggaggccaaggtgggtggatcacctgaggtcaggagctcgagaccagcctggccaacatggtgaaaccccatctctactaaaaatacaaaaattagccaggtgtgatggtgcatgcctgtaatcccagctcctcagtaggctgagacaggagcatcacttgaacgtgggaggcagaggttgcagtgagccgagattgcaccaccgcactccagcctgggtgacagagcgagacttatctcataaataaatagatagatactccagcctgggtgacagagcgagacttatagatagatagatagatagatggatagatagatagatagatagatagatagataaacggaattggagccattttgctttaagtgaatggcagtcccttgtcttattcagaatataaaattcagtctgaatggcatcttacagattttacttcaatttttgtgtacggtattttttatttgactaaatcaatatattgtacagcctaagttaataaatgttatttatatatgcaaaaaaaaaaaaaaaaaaaa

SEQ ID NO: 231 - DNA, 4221 bp, Homo sapiens
cgataacgatttgtgttgtgagaggcgcaagctgcgatttctgctgaacttggaggcatttctacgacttttctctcagctgaggcttttcctccgaccctgatgctcttcaattcggtgctccgccagccccagcttggcgtcctgagaaatggatggtcttcacaataccctcttcaatcccttctgactggttatcagtgcagtggtaatgatgaacacacttcttatggagaaacaggagtcccagttcctccttttggatgtaccttctcttctgctcccaatatggaacatgtactagcagttgccaatgaagaaggctttgttcgattgtataacacagaatcacaaagtttcagaaagaagtgcttcaaagaatggatggctcactggaatgccgtctttgacctggcctgggttcctggtgaacttaaacttgttacagcagcaggtgatcaaacagccaaattttgggacgtaaaagctggtgagctgattggaacatgcaaaggtcatcaatgcagcctcaagtcagttgccttttctaagtttgagaaagctgtattctgtacgggtggaagagatggcaacattatggtctgggataccaggtgcaacaaaaaagatgggttttataggcaagtgaatcaaatcagtggagctcacaatacctcagacaagcaaaccccttcaaaacccaagaagaaacagaattcaaaaggacttgctccttctgtggatttccagcaaagtgttactgtggtcctctttcaagacgagaataccttagtctcagcaggagctgtggatgggataatcaaagtatgggatttacgtaagaattatactgcttatcgacaagaacccatagcatccaagtctttcctgtacccaggtagcagcactcgaaaacttggatattcaagtctgattttggattccactggctctactttatttgctaattgcacagacgataacatctacatgtttaatatgactgggttgaagacttctccagtggctattttcaatggacaccagaactctaccttttatgtaaaatccagccttagtccagatgaccagtttttagtcagtggctcaagtgatgaagctgcctacatatggaaggtctccacaccctggcaacctcctactgtgctcctgggtcattctcaagaggtcacgtctgtgtgctggtgtccatctgacttcacaaagattgctacctgttctgatgacaatacactaaaaatctggcgcttgaatagaggcttagaggagaaaccaggaggtgataaactttccacggtgggttgggcctctcagaagaaaaaagagtcaagacctggcctagtaacagtaacgagtagccagagtactcctgccaaagcccccagggtaaagtgcaatccatccaattcttccccgtcatccgcagcttgtgccccaagctgtgctggagacctccctcttccttcaaatactcctacgttctctattaaaacctctcctgccaaggcccggtctcccatcaacagaagaggctctgtctcctccgtctctcccaagccaccttcatctttcaagatgtcgattagaaactgggtgacccgaacaccttcctcatcaccacccatcactccacctgcttcggagaccaagatcatgtctccgagaaaagcccttattcctgtgagccagaagtcatcccaagcagaggcttgctctgagtctagaaatagagtaaagaggaggctagactcaagctgtctggagagtgtgaaacaaaagtgtgtgaagagttgtaactgtgtgactgagcttgatggccaagttgaaaatcttcatttggatctgtgctgccttgctggtaaccaggaagaccttagtaaggactctctaggtcctaccaaatcaagcaaaattgaaggagctggtaccagtatctcagagcctccgtctcctatcagtccgtatgcttcagaaagctgtggaacgctacctcttcctttgagaccttgtggagaagggtctgaaatggtaggcaaagagaatagttccccagagaataaaaactggttgttggccatggcagccaaacggaaggctgagaatccatctccacgaagtccgtcatcccagacacccaattccaggagacagagcggaaagacattgccaagcccggtcaccatcacgcccagctccatgaggaaaatctgcacatacttccatagaaagtcccaggaggacttctgtggtcctgaacactcaacagaattatagattctaatctgagtgagttactgagctttggtccactaaaacaagctgagctttggtccactaaaacaagatgaaaaatacaagagtgactctataactctggtctttaagaaagctgccttttcatttttagacaaaatcttttcaacgctgaaatgtacctaatctggttctactaccataatgtatatgcagcttcccgaggatgaatgctgtgtttaaatttcataaagtaaatttgtcactctagcattttgaatgaatagtcttcactttttaaattattcatcttctctataataatgacatcccagttcatggaggcaaaaaacaagtttcttgttatcctgaaactttctatgctcagtggaaagtatctgccagccacagcatgaggcctgtgaaggctgactgagaaatcctctgctgaagacccctggttctgttctgcctccaacatgtataattttatttgaaatacataatcttttcactatgcttttgtggggttttttttaagtatgtgtaaaaatgtgatgctcagataagtacatttatatcagttcagtgttaaaatgcagtctcttgagttaaagtcatctttattttaaatgcagtgataaatgtcaactcttcggagaaactaggagaacaacaacagaaagctgtgtttgtcttttttctctcaaatatatctcccgtatgagatttcaggtccccatgttttcaccaagcaatctgctatgtcagccaacccaacatcactttctacaggaggttatgatttttgccatttactagaggaagatgttttatgaaatcaatttggggtttgaattcaggtgcagtcatcagttctttaggggctgcaatgttttaaaaaaaataagtcatcagattttaagaaaaaagtgatgatttcttattgatatttttgtaacagaatatagctcttaactgaaaatccagaaccagaaacataaatcttgagtttcttttcatgtacataaaaagcaatagccttttagtatagatagccctgagccaaaaagtaatagaattttctctagatatttaatacagagagtgtatagactgactctaagttaataatgtgcaaaatatcttaaacatccctccccttattcaacaattatgtatcagtgatcttgaaccattgttttatatttttcacctttgtaacctcatggaaagaggctttacatactttctatgtactatttacttagaagggagcccccttccagtcatgaaacttcatttgttttatccatatccctgaggactgtgtagactttatgtcagttctgtgtagactttatgtcagtttttgtcattatttgaaaatctattctgacaactttttaattcctttgatcttataagttaaagctgtaacaactgaaattgcatggatcaagtaagcatagttttatccagggagaaaaataaaaggaagccatagaattgctctggtcaaaaccaagcacaccatagccttaactgaatatttaggaaatctgcctaatctgcttatatttggtgtttgttttttgactgttgggctttgggaagatgttatttatgaccaatatctgccagtaacgctgtttatctcacttgctttgaaagccaatgggggaaaaaaatccatgaaaaaaaaaagattgataaagtagatgattttgtttgtatccctacccatctcctggcagccctactgagtgaaattgggatacatttggctgtcagaaattataccgagtctactgggtataacatgtctcacttggaaagctagtacttttaaatgggtgccaaaggtcaactgtaatgagataattatccctgcctgtgtccatgtcagactttgagctgatcctgaataataaagccttttacctt

SEQ ID NO: 232 - DNA, 3091 bp, Homo sapiens; identical to SEQ ID NO: 169

SEQ ID NO: 233 - DNA, 3128 bp, Homo sapiens
gcttcgccccgtggcgcggtttgaaattttgcggggctcaacggctcgcggagcggctacgcggagtgacatcgccggtgtttgcgggtggttgttgctctcggggccgtgtggagtaggtctggacctggactcacggctgcttggagcgtccgccatgaggagaagtgaggtgctggcggaggagtccatagtatgtctgcagaaagccctaaatcaccttcgggaaatatgggagctaattgggattccagaggaccagcggttacaaagaactgaggtggtaaagaagcatatcaaggaactcctggatatgatgattgctgaagaggaaagcctgaaggaaagactcatcaaaagcatatccgtctgtcagaaagagctgaacactctgtgcagcgagttacatgttgagccatttcaggaagaaggagagacgaccatcttgcaactagaaaaagatttgcgcacccaagtggaattgatgcgaaaacagaaaaaggagagaaaacaggaactgaagctacttcaagagcaagatcaagaactgtgcgaaattctttgtatgccccactatgatattgacagtgcctcagtgcccagcttagaagagctgaaccagttcaggcaacatgtgacaactttgagggaaacaaaggcttctaggcgtgaggagtttgtcagtataaagagacagatcatactgtgtatggaagaattagaccacaccccagacacaagctttgaaagagatgtggtgtgtgaagacgaagatgccttttgtttgtctttggagaatattgcaacactacaaaagttgctacggcagctggaaatgcagaaatcacaaaatgaagcagtgtgtgaggggctgcgtactcaaatccgagagctctgggacaggttgcaaatacctgaagaagaaagagaagctgtggccaccattatgtctgggtcaaaggccaaggtccggaaagcgctgcaattagaagtggatcggttggaagaactgaaaatgcaaaacatgaagaaagtgattgaggcaattcgagtggagctggttcagtactgggaccagtgcttttatagccaggagcagagacaagcttttgcccctttctgtgctgaggactacacagaaagtctgctccagctccacgatgctgagattgtgcggttaaaaaactactatgaagttcacaaggaactctttgaaggtgtccagaagtgggaagaaacctggaggcttttcttagagtttgagagaaaagcttcagatccaaatcgatttacaaaccgaggaggaaatcttctaaaagaagaaaaacaacgagccaagctccagaaaatgctgcccaagctggaagaagagttgaaggcacgaattgaattgtgggaacaggaacattcaaaggcatttatggtgaatgggcagaaattcatggagtatgtggcagaacaatgggagatgcatcgattggagaaagagagagccaagcaggaaagacaactgaagaacaaaaaacagacagagacagagatgctgtatggcagcgctcctcgaacacctagcaagcggcgaggactggctcccaatacaccgggcaaagcacgtaagctgaacactaccaccatgtccaatgctacggccaatagtagcattcggcctatctttggagggacagtctaccactcccccgtgtctcgacttcctccttctggcagcaagccagtcgctgcttccacctgttcagggaagaaaacaccccgtactggcaggcatggagccaacaaggagaacctggagctcaacggcagcatcctgagtggtgggtaccctggctcggcccccctccagcgcaacttcagcattaattctgttgccagcacctattctgagtttgcgaaggatccgtccctctctgacagttccactgttgggcttcagcgagaactttcaaaggcttccaaatctgatgctacttctggaatcctcaattcaaccaacatccagtcctgagaagccctgatcagtcaaccagctgtggcttcctgtgcctagactggacctaattatatgggggtgactttagtttttcttcagcttaggcgtgcttgaaaccttggccaggttccatgaccatgggcctaacttaaagatgtgaatgagtgttacagttgaaagcccatcataggtttagtggtcctaggagacttggttttgacttatatacatgaaaagtttatggcaagaagtgcaaattttagcatatggggcctgacttctctaccacataattctacttgctgaagcatgatcaaagcttgttttatttcaccactgtaggaaaatgattgactatgcccatccctgggggtaattttggcatgtatacctgtaactagtaattaacatcttttttgtttaggcatgttcaattaatgctgtagctatcatagctttgctcttacctgaagccttgtccccaccacacaggacagccttcctcctgaagagaatgtctttgtgtgtccgaagttgagatggcctgccctactgccaaagaggtgacaggaaggctgggagcagctttgttaaattgtgttcagttctgttacacagtgcattgccctttgttgggggtatgcatgtatgaacacacatgcttgtcggaacgctttctcggcgtttgtcccttggctctcatctcccccattcctgtgcctactttgcctgagttcttctacccccgcagttgccagccacattgggagtctgtttgttccaatgggttgagctgtctttgtcgtggagatctggaactttgcacatgtcactactggggaggtgttcctgctctagcttccacgatgaggcgccctctttacctatcctctcaatcactactcttcttgaagcactattatttattcttccgctgtctgcctgcagcagtactactgtcaacatagtgtaaatggttctcaaaagcttaccagtgtggacttggtgttagccacgctgtttactcatacagtacgtgtcctgtttttaaaatatacaattattcttaaaaataaattaaaatctgtatacttacatttcaaaaagaaaaaaaaaaaaaaaa

SEQ ID NO: 234 - DNA, 3011 bp, Homo sapiens
gcttcgccccgtggcgcggtttgaaattttgcggggctcaacggctcgcggagcggctacgcggagtgacatcgccggtgtttgcgggtggttgttgctctcggggccgtgtggagtaggtctggacctggactcacggctgcttggagcgtccgccatgaggagaagtgaggtgctggcggaggagtccatagtatgtctgcagaaagccctaaatcaccttcgggaaatatgggagctaattgggattccagaggaccagcggttacaaagaactgaggtggtaaagaagcatatcaaggaactcctggatatgatgattgctgaagaggaaagcctgaaggaaagactcatcaaaagcatatccgtctgtcagaaagagctgaacactctgtgcagcgagttacatgttgagccatttcaggaagaaggagagacgaccatcttgcaactagaaaaagatttgcgcacccaagtggaattgatgcgaaaacagaaaaaggagagaaaacaggaactgaagctacttcaagagcaagatcaagaactgtgcgaaattctttgtatgccccactatgatattgacagtgcctcagtgcccagcttagaagagctgaaccagttcaggcaacatgtgacaactttgagggaaacaaaggcttctaggcgtgaggagtttgtcagtataaagagacagatcatactgtgtatggaagaattagaccacaccccagacacaagctttgaaagagatgtggtgtgtgaagacgaagatgccttttgtttgtctttggagaatattgcaacactacaaaagttgctacggcagctggaaatgcagaaatcacaaaatgaagcagtgtgtgaggggctgcgtactcaaatccgagagctctgggacaggttgcaaatacctgaagaagaaagagaagctgtggccaccattatgtctgggtcaaaggccaaggtccggaaagcgctgcaattagaagtggatcggttggaagaactgaaaatgcaaaacatgaagaaagtgattgaggcaattcgagtggagctggttcagtactgggaccagtgcttttatagccaggagcagagacaagcttttgcccctttctgtgctgaggactacacagaaagtctgctccagctccacgatgctgagattgtgcggttaaaaaactactatgaagttcacaaggaactctttgaaggtgtccagaagtgggaagaaacctggaggcttttcttagagtttgagagaaaagcttcagatccaaatcgatttacaaaccgaggaggaaatcttctaaaagaagaaaaacaacgagccaagctccagaaaatgctgcccaagctggaagaagagttgaaggcacgaattgaattgtgggaacaggaacattcaaaggcatttatggtgaatgggcagaaattcatggagtatgtggcagaacaatgggagatgcatcgattggagaaagagagagccaagcaggaaagacaactgaagaacaaaaaacagacagagacagagatgctgtatggcagcgctcctcgaacacctagcaagcggcgaggactggctcccaatacaccgggcaaagcacgtaagctgaacactaccaccatgtccaatgctacggccaatagtagcattcggcctatctttggagggacagtctaccactcccccgtgtctcgacttcctccttctggcagcaagccagtcgctgcttccacctgttcagggaagaaaacaccccgtactggcaggcatggagccaacaaggagaacctggagctcaacggcagcatcctgagtgcgagaactttcaaaggcttccaaatctgatgctacttctggaatcctcaattcaaccaacatccagtcctgagaagccctgatcagtcaaccagctgtggcttcctgtgcctagactggacctaattatatgggggtgactttagtttttcttcagcttaggcgtgcttgaaaccttggccaggttccatgaccatgggcctaacttaaagatgtgaatgagtgttacagttgaaagcccatcataggtttagtggtcctaggagacttggttttgacttatatacatgaaaagtttatggcaagaagtgcaaattttagcatatggggcctgacttctctaccacataattctacttgctgaagcatgatcaaagcttgttttatttcaccactgtaggaaaatgattgactatgcccatccctgggggtaattttggcatgtatacctgtaactagtaattaacatcttttttgtttaggcatgttcaattaatgctgtagctatcatagctttgctcttacctgaagccttgtccccaccacacaggacagccttcctcctgaagagaatgtctttgtgtgtccgaagttgagatggcctgccctactgccaaagaggtgacaggaaggctgggagcagctttgttaaattgtgttcagttctgttacacagtgcattgccctttgttgggggtatgcatgtatgaacacacatgcttgtcggaacgctttctcggcgtttgtcccttggctctcatctcccccattcctgtgcctactttgcctgagttcttctacccccgcagttgccagccacattgggagtctgtttgttccaatgggttgagctgtctttgtcgtggagatctggaactttgcacatgtcactactggggaggtgttcctgctctagcttccacgatgaggcgccctctttacctatcctctcaatcactactcttcttgaagcactattatttattcttccgctgtctgcctgcagcagtactactgtcaacatagtgtaaatggttctcaaaagcttaccagtgtggacttggtgttagccacgctgtttactcatacagtacgtgtcctgtttttaaaatatacaattattcttaaaaataaattaaaatctgtatacttacatttcaaaaagaaaaaaaaaaaaaaaaaa

SEQ ID NO: 235 - DNA, 3994 bp, Homo sapiens
gcccgctccagccgccgcgcatcctcggcccgcgccccgagacccgcgcccagctagccccggccccgctcggcgccccaggcagctcggctgcgctcgccgcgggacggcgcggccatgaggctgcggggatgcggaccccgggccgcccctgcctccagcgcaggggccagcgacgctcggctgctggcgcccccggggcggaaccccttcgtgcacgagctgcgcctcagcgccctgcagaaggcccaggtggccctcatgacactgacgctcttcccggtccggctcctggttgccgctgccatgatgctgctggcctggcccctcgcacttgtcgcatccctgggctctgcggagaaggaacccgagcagcccccggccctgtggaggaaggttgtggacttcctgctgaaggccatcatgcgcaccatgtggttcgccggcggcttccaccgggtggccgtgaaggggcggcaggcgctgcccaccgaggcggccatcctcacgctcgcgcctcactcgtcctacttcgacgccatccctgtgaccatgacgatgtcctccatcgtgatgaaggcagagagcagagacatcccgatctggggaactctgatccagtatatacggcctgtgttcgtgtcccggtcagaccaggattctcgcaggaaaacagtagaagaaatcaagagacgggcgcagtccaacggaaagtggccacagataatgatttttccagaaggaacttgtacaaacaggacctgcctaattaccttcaaacctggtgcattcatccctggagcgcccgtccagcctgtggttttacgatatccaaataaactggacaccatcacatggacgtggcaaggacctggagcgctggaaatcctgtggctcacgctgtgtcagtttcacaaccaagtggaaatcgagttccttcctgtgtacagcccttctgaggaggagaagaggaaccccgcgctgtatgccagcaacgtgcggcgagtcatggccgaggccttgggtgtctccgtgactgactacacgttcgaggactgccagctggccctggcggaaggacagctccgtctccccgctgacacttgccttttagaatttgccaggctcgtgcggggcctcgggctaaaaccagaaaagcttgaaaaagatctggacagatactcagaaagagccaggatgaagggaggagagaagataggtattgcggagtttgccgcctccctggaagtccccgtttctgacttgctggaagacatgttttcactgttcgacgagagcggcagcggcgaggtggacctgcgagagtgtgtggttgccctgtctgtcgtctgccggccggcccggaccctggacaccatccagctggctttcaagatgtacggagcgcaagaggacggcagcgtcggcgaaggtgacctgtcctgcatcctcaagacggccctgggggtggcagagctcaccgtgaccgacctattccgagccattgaccaagaggagaaggggaagatcacattcgctgacttccacaggtttgcagaaatgtaccctgccttcgcagaggaatacctgtacccggatcagacacatttcgaaagctgtgcagagacctcacctgcgccaatcccaaacggcttctgtgccgatttcagcccggaaaactcagacgctgggcggaagcctgttcgcaagaagctggattaggacccagggttgcggagagacgcggcccctcccgcgtggacatcaccgccatgagcctctttgcgagtgacctctgggctccgctcctcactcctgctgtacaggcactgtcttcagcccgagttccaggggcctcgggggctgtttgtatcttgttcctttgtgaagtgtgttgcagaaccgacgcttactgtgcgagaatcggagggcgcgcacgcggatcccccgcctggcctggaccccgtggggtcaggttccctgccgggcggggggcaccggtgccgccccgtgttctcccacggggccctggtttcgagtctctgtcacagcctcttccggcggcagcgtgcaccgggcgggcctccgtgcacactcagcacacgcctgccacacagcgtgcgcttgcgtgtcactctggcacgaaacctgtctgcctctgtggatccacagcctggcagagccgagccgtcacctgatttttcagtgtttctacctgtgtgctggagctcatgagtattttataaactccatttaggtacttcaggaaacatgcagcattttttaaaaaatgaaaattgtttttctacttcatttttccttttagagtcaaaggatatttatttataggcctttttttttttaatatagaatctgaggctgtttgggctttgacttaaatttccatcaggcctctctccagcaggtaatccctctccttccgctgggtcccctggggaggtgtgaactcaagggcctagccccaaaacactttttctgcttttcttaatccttttccagtcccctctttttttataaacgttggcagtttgatgtttctgtttcggcataacgtaatccatttcactgtagcctaaactccagtccgaggttggatattgttcaaatgagcagggcccgagctggaagcgcaaggcagccgccgccgtgccgctcctcccttgccctcaggccaggtccctgctggaagcggctgcatcttcctgtcagccctggtttccatggtgactggcgtcacgcagccacccgagtatggctgaccttcctgcagagagaggagccgcagtcttttgcttgtggaaggagacgctgggctgtgcggtgcggagggtgatgaggatgtctggtgacagccgtgcggacaccactcctctctgcagcactgcctcccagcgccagggtcgcgggcacatcccactgagagcgggggtcctgccccatcttagagtcaaaggcagaggggcttccaggccctggatggggtattttggtgtcacctgaagtccctctgacatcaccttgtttcatcattttttatgacagaattagaaacccatccttcaagcacaataatcatcacagacttgagtttgcttcctaaagcaaaggctccgggtttgtttggaaaatttttttgatttctgaaatgaattgatttttatatttggggcatctctatagaaagtgaccaccaaggccagtaagtacgggaaaaaatgtttactaacttcctcagagattcgtgatacgcgtttctccactgacagacatttaaaaacaaccttcagctccgtttcaatcaatcacctcgacttgttttttagcatggacactgccagcaggacagacagggatggagtaaaccgaagtcaatttcagggctcttggcgtgttggacacagaagaaatcctagtgcagcctttggtagctaacagtcactgattttataattggagaatgcgtaaagattcatttttcaaggagaagagcctgcaaatggccaatgaaggaggtaaataaactaagatattccgagggaagggacccaggccacctcccttccgcaggtctgcagatgaagggttttttgaatgaaatgccactgtgcattttcagaaaaaaaaatctctgataaacagactttgaatggatgtttgttcctcctgattctcttttctcttcgtggcgacttagagttggcggatattcggaactgtgaatgtacatagcgttgagttaaaccccttgtgtgtgagacaggacgcagcgggcccctggtggcctgggggccagacccgtgggcaggtggggcatgggccctggcctgcggggacctgctggggtgtgagggcagagggagggttgccatgaaggaacttgggattttcaatggaataagtaaaacataaagtctatacttgggaaaaaaaaaaaaaaaaaaaaaaaaaaaaaaaaaaaaaaaaaaaaaaaaaa

SEQ ID NO: 236 - DNA, 6276 bp, Homo sapiens
gagtgtggctgcagtgcgccgggacaccagggctccgcgctccgcactcaagaggctcccgcgtcccaacccctcgcgcccgcgcgttcgcggatccaggccgaggaccgaaaggggccgcccgagcccccggggccggcgcccagagagcccagcaaggccggccgccctgccggtgtgccgccggcgggtgcttctggaagggccaatgcgttcgggcagcagccctgaagccgagcccgaggctaagtgggactgaccggggcccagagtggacgaaccgccagcatggggagagaccagcgcgcggtggccggccctgccctacggcggtggctgctgctggggacagtgaccgtggggttcctcgcccagagcgtcttggcgggtgtgaagaagtttgatgtgccgtgtggaggaagagattgcagtgggggctgccagtgctaccctgagaaaggtggacgtggtcagcctgggccagtgggcccccaggggtacaatgggccaccaggattacaaggattccccgggctgcagggacgtaaaggagacaagggtgaaaggggagcccccggagtaacaggacccaagggcgacgtgggagcaagaggcgtttctggattccctggtgccgatggaattcctggacacccggggcaaggtgggcccaggggaaggccgggctacgatggctgcaacggaacccagggagactcaggtccacaggggccccccggctctgaggggttcaccgggcctcccgggccccaaggaccaaaagggcagaaaggtgagccttatgcactgcctaaagaggagcgcgacagatatcggggtgaacctggagagcctggattggtcggtttccagggacctcccggccgccctgggcatgtgggacagatgggtccagttggagctccagggagaccaggaccacctggaccccctggaccaaaaggacagcaaggcaacagaggacttggtttctacggagttaagggtgaaaagggtgacgtagggcagccgggacccaacgggattccatcagacaccctccaccccatcatcgcgcccacaggagtcaccttccacccagatcagtacaagggtgaaaaaggcagtgagggggaaccaggaataagaggcatttccttgaagggagaagaaggaatcatgggctttcctggacttaggggttaccctggcttgagtggtgaaaaaggatcaccaggacagaagggaagccgaggcctggatggctatcaagggcctgatggaccccggggacctaagggagaagccggagacccagggccccctggactacctgcctactcccctcacccttccctagcaaaaggtgccagaggtgacccaggattcccaggggcccaaggggagccaggaagccagggtgagccaggagacccgggcctcccaggtccccctggcctctccattggagatggagatcagaggagaggcctgccgggtgagatgggacccaagggcttcatcggagaccccggcatccctgcgctctacgggggcccacctggacctgatggaaagcgagggcctccaggaccccccgggctccctggaccacctggacctgatggcttcctgtttgggctgaaaggagcaaaaggaagagcaggcttccctgggcttcccggctcccctggagcccccggaccaaaggggtggaaaggtgacgctggggaatgcagatgtacagaaggcgacgaagctatcaaaggtcttccaggactgccaggacccaagggcttcgcaggcatcaacggggagccggggaggaaaggggacaaaggagaccccggccaacacggcctccctgggttcccagggctcaagggagtgcctggcaacattggtgctcccggacccaaaggagcaaaaggagattccagaacaatcacaaccaaaggtgagcggggacagcccggcgtcccaggtgtgcccgggatgaaaggtgacgatggcagcccaggccgcgatgggctcgatggattccccggcctcccaggccctcccggtgatggcatcaagggccctccaggggacccaggttatccaggaatacctggaacgaagggtactccaggagaaatgggccccccaggactgggccttcccggcctcaaaggccaacgtggtttccctggagacgccggcttacctggaccaccaggcttcctgggccctcctggccccgcagggaccccaggacaaatagattgtgacacagatgtgaaaagggccgttggaggtgacagacaggaggccatccagccaggttgcataggagggcccaagggattgccaggcctgccaggacccccaggccccacaggtgccaaaggcctccgaggaatcccaggcttcgcaggagctgatggaggaccagggcccaggggcttgccaggagacgcaggtcgtgaagggttcccaggacccccagggttcataggaccccgaggatccaaaggtgcagtgggcctccctggcccagatggatccccaggtcccatcggcctgccagggccagatgggccccctggggaaaggggcctccctggagaagtcctgggagctcagcccgggccacggggagatgctggtgtgcctggacagcctgggcttaaaggccttcccggagacagaggcccccctggattcagaggaagccaagggatgcctgggatgccagggctgaagggccagccaggcctcccaggaccttccggccagccaggcctgtatgggcctccaggactgcatggattcccaggagctcctggccaagaggggcccttggggctgccaggaatcccaggccgtgaaggtctgcctggtgatagaggggaccctggggacacaggcgctcctggccctgtgggcatgaaaggtctctctggtgacagaggagatgctggcttcacaggggagcaaggccatccaggaagccctggatttaaaggaattgatggaatgcctgggacccccgggctaaaaggagatagaggctcacctgggatggatggtttccaaggcatgcctggactcaaagggagacccgggtttccagggagcaaaggcgaggctggatttttcggaatacccggtctgaagggtctggctggtgagccaggttttaaaggcagccgaggggaccctgggcccccaggaccacctcctgtcatcctgccaggaatgaaagacattaaaggagagaaaggagatgaagggcctatggggctgaaaggatacctgggcgcaaaaggtatccaaggaatgccaggcatcccagggctgtcaggaatccctgggctgcctgggaggcccggccacatcaaaggagtcaagggagacatcggagtccccggcatccccggtttgccaggattccctggggtggctggcccccctggaattacgggattcccaggattcataggaagccggggtgacaaaggtgccccagggagagcaggcctgtatggcgagattggcgcgactggtgatttcggtgacatcggggacactataaatttaccaggaagaccaggcctgaagggggagcggggcaccactggaataccaggtctgaagggattctttggagagaagggaacagaaggtgacatcggcttccctgggataacaggcgtgactggagtccaaggccctcctggacttaaaggacaaacaggctttccagggctgactgggcctccagggtcgcagggagagctggggcggattggactgcctggtggcaaaggagatgatggctggccgggagctccgggcttaccaggttttccgggactccgtgggatccgcggcttacacggcttgccaggcaccaagggctttccaggatccccaggttctgacatccacggagacccaggcttcccaggccctcctggggaaagaggtgacccaggagaggccaacacccttccaggccctgtgggagtcccaggacagaaaggagaccaaggagctccaggggaacgaggcccacctgggagcccaggacttcaggggttcccaggcatcacacccccttccaacatctctggggcacctggtgacaaaggggcgccagggatatttggcctgaaaggttatcggggcccaccagggccaccaggttctgctgctcttcctggaagcaaaggtgacacagggaacccaggagctccaggaaccccagggaccaaaggatgggccggggactccgggccccagggcaggcctggtgtgtttggtctcccaggagaaaaagggcccaggggtgaacaaggcttcatggggaacactggacccaccggggcggtgggcgacagaggccccaagggacccaagggagacccaggattccctggtgcccccgggactgtgggagcccccgggattgcaggaatcccccagaagattgccgtccaaccagggacagtgggtccccaggggaggcgaggcccccctggggcaccgggggagatggggccccagggcccccccggagaaccaggttttcgtggggctccagggaaagctgggccccaaggaagaggtggtgtgtctgctgttcccggcttccggggagatgaaggacccataggccaccaggggccgattggccaagaaggtgcaccaggccgtccagggagcccgggcctgccgggtatgccaggccgcagcgtcagcatcggctacctcctggtgaagcacagccagacggaccaggagcccatgtgcccggtgggcatgaacaaactctggagtggatacagcctgctgtacttcgagggccaggagaaggcgcacaaccaggacctggggctggcgggctcctgcctggcgcggttcagcaccatgcccttcctgtactgcaaccctggtgatgtctgctactatgccagccggaacgacaagtcctactggctctctaccactgcgccgctgcccatgatgcccgtggccgaggacgagatcaagccctacatcagccgctgttctgtgtgtgaggccccggccatcgccatcgcggtccacagtcaggatgtctccatcccacactgcccagctgggtggcggagtttgtggatcggatattccttcctcatgcacacggcggcgggagacgaaggcggtggccaatcactggtgtcaccgggcagctgtctagaggacttccgcgccacaccattcatcgaatgcaatggaggccgcggcacctgccactactacgccaacaagtacagcttctggctgaccaccattcccgagcagagcttccagggctcgccctccgccgacacgctcaaggccggcctcatccgcacacacatcagccgctgccaggtgtgcatgaagaacctgtgagccggcgcgtgccaggaagggccattttggtgcttattcttaacttattacctcaggtgccaacccaaaaattggctttatttttttcttaaaaaaaaaaaagtctaccaaaggaatttgcatccagcagcagcacttagacctgccagccactgtcaccgagcgggtgcaagcactcggggtccctggagggcaagccctgcccacagaaagccaggagcagccctggcccccatcagccctgctagacgcaccgcctgaaggcacagctaaccacttcgcacacacccatgtaaccactgcactttccaatgccacagacaactcacattgttcaactcccttctcggggtgggacagacgagacaacagcacacaggcagccagccgtggccagaggctcgaggggctcaggggctcaggcacccgtccccacacgagggccccgtgggtgggcctggccctgctttctacgccaatgttatgccagctccatgttctcccaaataccgttgatgtgaattattttaaaggcaaaaccgtgctctttattttagaaaacactgataatcacactgcggtaggtcattcttttgccacatccctatagaccactgggtttggcaaaactcaggcagaagtggagacccttctagacatcactgtcagccttgctacttgaaggtacaccccatagggtcggaggtgctgtccccactgccccacgttgtccctgagatttaacccctccactgctgggggtgagctgtactcttctgactgccccctcctgtgtaacgactacaaaataaaacttggttctgaatatttttaaaaaaaaaaaaaaaa

SEQ ID NO: 237 - DNA, 2501 bp, Homo sapiens; identical to SEQ ID NO: 145

SEQ ID NO: 238 - DNA, 5395 bp, Homo sapiens
acgcgcgcagccagcccttccccctccggctcccgcaccgccggccgcctcccctcgccctcctactctcccctccctgctccttcgctttttcctcctcctcctctcccggccccggctgccagcaccatgtccgcagggggagattttgggaatccactgagaaaattcaagttggtgttcttgggggagcagagcgtcgggaagacgtctctgattacgaggttcatgtacgacagcttcgacaacacataccaggcaaccattgggattgacttcttgtcaaaaaccatgtacttggaggaccgcacggtgcgactgcagctctgggacacagctggtcaggagaggttccgcagcctgatccccagctacatccgggactccacggtggctgtggtggtgtacgacatcacaaatctcaactccttccaacagacctctaagtggatcgacgacgtcaggacagagaggggcagtgatgttatcatcatgctggcgggcaacaagacggacctggctgataagaggcagataaccatcgaggagggggagcagcgcgccaaagaactgagcgtcatgttcattgagaccagtgcgaagactggctacaacgtgaagcagctttttcgacgtgtggcgtcggctctacccggaatggagaatgtccaggagaaaagcaaagaagggatgatcgacatcaagctggacaaaccccaggagcccccggccagcgagggcggctgctcctgctaatgcagagccgacctgtggcttcccatgacactccttgcttgttgtgttgcttcctattggctagcttcctaaggggggagggaaccgagttatcaagatgggaggatttttcttttctctctgtctttaggtgtagggtgggatggggagggaggctggacatcagggatcacatcactcttaacggctgttacttaaacaactattttttggtttggttgtaatatattgtactttattaagattgccaaaaactgttaaaatttaaaaaaaatttaaatcatgtgtatacaattttttgccagataaaaatgtagtcatttttatttgaaagatgtgctttttgtttttgtatatttgtaaacttatagagaaccttttccacacacctcctccttcctgttctctttgaaccattcatcacctctgccttcctcctatccccagcccaataaattaaaacaattaactgagcaaattaattaggcttcagtctggggccatctggccccactctctaggccctactccagttaaatcaaacattggttgaacacatcagcctctgaaaaggtagctctgactcttgtctttccatggccagagtgggtcgtcaacctcgtgtggagctgagaccaaggtctgtgggctctaggcagcccggcagcagcccccagaggaactgctcccacctctccttctctttccctgaaaagccttgaagggggttgagggtacaggcaaccttgtgttctctgtgccctcagggactggcagagcaagaggccatcagaaggacgaggtgctgttggcaattgcagctgcgtggtgcgtggtttatagactggggtgccatgtgtacttctgaaaatattttaaccagcccacccagcagtcagtacacatgcctgggccaagtctaagaaactcagtgtgtgatgttgggcagtgtgccatcctgaagccttcctcctggatgtcagggaagctggaccacctggagttgatcctctgtgatggggaggcgggggggggggggggtgttgtctgcagaaccaccaccttgaaagatccatgttcttagagcctcagctgctaatattgttgagtgctttctggaaaagctgatttgttgctatgttttcaccccagtggcatggcgcagttgaagtctttgtggacatatctttgtggctactgtggctgcgctgtggtcacctgaggatgtggttcaggtggggtctccagaaggctgcttgcccccagagagccatctcttccatttttgattcattcctgagaatggcttagtcctgagaatctgcaaagtctctgaagagaactctctcttcccactaagtgagtctggccaaaatgtaaaccccaccctccctgctgtcattggctctccctccaggctgctgctgggcatgtcatagatgggatgaatgaccatctggggtatggtgggctgaactccacaaggtcgttggaatgaattttgaaacttctcagaaattaatctgaaatggcaggcagtaagtgcagcagaatctggcaggactgatatttgtgcagtgggcctgccacacaccctctgcctaggaggctgtgtgccagagctcatctctagcaaggaatttatcttcaggtgaagaagagaggaagcaggatcccactgagcacctcttgcagaaggcaaggaccaatgtttgaacgtgtttcagatgtcatgtgtttagtttttatatgtgtgtacataattatatatagagatagacttgtgtatacaccttccacaaacacatcctcacggagatacatgtgctcaatgtatattcttgtttctcctgctctcaagttggaacttgcattgtgataagttttggaaattcaaaagtactgcaacgtgttgaaataagaaatacttaatattgtcaaataacttgtgattgtcttgccatcaataaaataatgcatagttgtgttaaactacaggcaaacatagcccacgggaatatctccaccatttctctatgtactttatatgcacgggtgtgcatgcctgtgtgggccagtgtccccccaccatgggcacacccccaagtggtgcttgttggaagagtgcttacttacctcgagagaatttacaggagtccacatgacagtgtcctgcctggttggcagcgggggccatcacctgtggcctctgagaccgccccatttacaggaatctgcactgggtctcagtgaatgaacgtatggtagatttttattttcttggcactaaagattagcttttttaaaaaaacatcccataaaacagtagaaactcagttcccttctcaggggcacacacatccaaggcaccgtggactgtgtttccatcctggcctagaggagcagtaaaagatagcatttggtttgacatggccttagtgagtcctgcctttcctagcatgcacacaacatcctctctttgagtttgggttctccccagccccttggcctctgaggctgagggtggcttcctcccatcctcccatctcagtggttccatggcgctcccttcggcacgtgcggtttccgcccctcccttcctggggtgtggaaaggcagccagacctctttttcagaagttgttggttccctgatttttgtcttgagcaggcaccatccctgtccccttgcttgcaggtagaattggcacagagttaaggttccataataaactgttaggtgctcttgaagaagatgtcatggcattgcctcagcaccccagcaagagcattgcatctttgctgaatccagatgggttagcagagggcaaattggaggattcctttgaggaaatgttctcaattgagcaattcagtccctctccccaaagactagacgtgacctggcagattagcaggatcctcttggccttcttttttggggatggtgggagtgaagggggtgaatcttaaaagcttatcaacaaagctcctgttctgcaggcatcaggaaagttgagtgtaagatggaaaaagcaaacagcctatttacaagtggaaacacattggttctgatcactcctaacttgctgggtgatcatacatacatcaacatgaaggtgtgacatcagaatcatgagcaccatggctgcagttgtgtgatccaaggctagttggcttggtagctgttggcagcagtttcccttggtcagaggcctccttgctatctatcgctgctctcttcttgtcatccttaaacattcagtcatgttcccaggtctgaggggagcaatggccagaccagtttcagtatctctggcaacagaaacaaggattgaaatggtggtagttaagagtgcagacacatctggggtgcaacgtctgcatcatcctggtggctagccagtgcggggaggccctgccctgggataccagttgtgacaataaagggatggccctcctggcttcagcatcctgcaggtagagcagcctcattccttcacaagatggaaggcaggtgaggatgtcaggatgagatgggaccaggtagccgaggacagtgaggcatgtctgagccacttgaggggcagctgaacagaaggatgtctgtgtgcatcaaccgagcagattgtgcgcacactcgtttccgaactgcctctccccaaagaatgtgaggcattgtcaccttgttacagctatgtgaagcagagctgtcacaacttttcctgtctacaggcaggaaaaccaggatggagaagggcaacttgcttattaagatcacccagcaagttaggagtgatcagaaccagtgaagtttccatttttcatccattgctgccctgtgtgtgaacaaatgtgactccatatttattacacagcaaggactgctgtgtgtgggtgtgttcctcagaccatctctactctttttggttaggacactaggttcttcccagcatatgagtgagaatattggtggtattttgggctcctctactgcacaagggccagtccccaagtctactctgattgattgtcatgggcacccacacagatcaggacaccctttgaatttttgtttgacatgaactatttaggtgttccaaaaccttgggatctcaatgtgcaaactccttggactccagacccctgtctggttggcactcccagcagtgtgtggtttcatcaggaaatccttgcagcaggggtttagatggttccttcaggaggtgggaagcctccatagcattgaaggccagcctgcatctcgcggtgtgtgtccacttctcccctcactttcccctcacccatccctttaaagtgattggctgtgaggagcacagagggtggcaattccatctgttatgggctcagaagacatagccgccatgttgatttcacattaaactgtgtaaaatgtggaaaagactcagcatgttggtcaaacaataaactgtcctaattctcaaaaaaaaaaaaaaaaaaaaaaaaaaaaaaaaaaaaaaaaaaaaaaaaaaaaaaaaaaaaaaaaaaaaaaaaaaaaaaaaaaaaaaaaaaaaaaaaaaaaaaaaaaaaaaaaaaaaaaaaaaaaaaaaaaaaaaaaaaaaaaaaaaaaaaaaaaaaaaaaaaaaaaaaaaaaaaaa

SEQ ID NO: 239 - DNA, 2460 bp, Homo sapiens
aaagtcaaaccccgacaccgcggcgggccggtgagctcactagctgacccggcaggtcaggatctggcttagcggcgccgcgagctccagtgcgcgcacccgtggccgcctcccagccctctttgccggacgagctctgggccgccacaagactaaggaatggccaccccgcccaagagaagctgcccgtctttctcagccagctctgaggggacccgcatcaagaaaatctccatcgaagggaacatcgctgcagggaagtcaacatttgtgaatatccttaaacaattgtgtgaagattgggaagtggttcctgaacctgttgccagatggtgcaatgttcaaagtactcaagatgaatttgaggaacttacaatgtctcagaaaaatggtgggaatgttcttcagatgatgtatgagaaacctgaacgatggtcttttaccttccaaacatatgcctgtctcagtcgaataagagctcagcttgcctctctgaatggcaagctcaaagatgcagagaaacctgtattattttttgaacgatctgtgtatagtgacaggtatatttttgcatctaatttgtatgaatctgaatgcatgaatgagacagagtggacaatttatcaagactggcatgactggatgaataaccaatttggccaaagccttgaattggatggaatcatttatcttcaagccactccagagacatgcttacatagaatatatttacggggaagaaatgaagagcaaggcattcctcttgaatatttagagaagcttcattataaacatgaaagctggctcctgcataggacactgaaaaccaacttcgattatcttcaagaggtgcctatcttaacactggatgttaatgaagactttaaagacaaatatgaaagtctggttgaaaaggtcaaagagtttttgagtactttgtgatcttgctgaagactacaggcagccaaatggttccagatacttcagctttgtgtatcttcgtaacttcatattaatataagtttctttagaaaacccaagtttttaatcgtttttgttttaaggaaaaaagatttttaaaatgaatcttatgcaaaactttttgatcagtttcttttcttttgttttttttttaaaaaagacatttaaagacaaagacattatttctcatagcaggaaatgtagaggtagatggttccagtatcagcatagtgactaaactacattataaaagatccagcttccttctgtcattcccctcttttgtcttcctcagcaggttggcttttttccctggtgcctctcacttcgttggtgaccagtttcttaaactgaaagctttaatgttacatagtaaatggtagtgtgtcctgtgtaaattagtgtacctattaaaagttgcaaagtggaattaaaggaatccctagaataaggattctgaagttttattttaaattattatcttcttaacagtttagtcccacctcttacttcctgcctcagtctgctttctctactgtctggattaattaggcagcctgctataaagttaaagtcacacatttctattttgcaaacactgtgattactctttgctttgtagtttgctttgctttgtagggttctgcttttaagtttttctctttttcagacaaattactgataaaaatgatattgctctatatgtaatatatcctgaaagcattattttttgttgaataggaaataaaattaatgaagacagaggctagaaagcatccattaattaatgagacacacttaactacttatctctaaaccatctatgtgaatatttgtaaaaataatgaatggactcatcttagttctgtatataaatatattttctttctagtttgtttagttaaggtgtgcagtgtttttcctgtgtattaaacctttccattttacgttttagaaaattttatgtattttaaaataaggggaagagtcattttcacctttaaactactatttttctttccaagtcatttttgtttttggtttcttattcaaagatgataatttagtggattaaccagtccagacgcactgatctttgcaaaggagacttaatttcaaatctgtaattaccatacataaactgtctcattatacgtatgcatttttttagtttgtttttgtttggtataaattaatttgttaattaaatatttcttaagtataaaccttatgaactacagtggagctacactcattgaaatgtaatttcagttctaaaaagatgtaataatcattttagaattaaaatttattctacttttaaataaattatgaatattaaaggtgaaaattgtataaattactttgattccattttaagtggagacatatttcagtgatttttagtaacctttaaaaatgtataatgacttttaaaatttgtagaattgaaaagacgctaataaaaatttattattt

SEQ ID NO: 240 - DNA, 1389 bp, Homo sapiens; identical to SEQ ID NO: 86

SEQ ID NO: 241 - DNA, 5163 bp, Homo sapiens
ttaggggcagaaaaacatttgtaataattaatggctttgagagacacaaggctttgtttgccccagagtattagttaacccacctagtgctcctaatcatacaatattaaggattgggagggacattcattgcctcactctctatttgtttcaccttctgtaaaattggtagaataatagtacccacttcatagcattgtatgatgattaaattggttaatatttttaaaatgcttagaacacagattgggcacataacagcaagcaccacatgtgtttataagataaattcctttgtgttgccttccgttaaagtttaaataagtaaataaataaataaatacttgcatgacattttgaagtctctctataacatctgagtaagtggcggctgcgacaatgctactggagttccagaatcgtgttggtgacaagattgttcaccagcatatggtgtggtgaaaactcactaatttggaattagttcagattattaagcctgaataggtgaaaatcctgaaatcaaggatctttggaactatttgaaatcagtattttatattttcctgttgtattcattaaagtgttgcaagtgttctatttgatggattaagtatatttaggatatacatgttcaatttgtgattttgtatacttaattggaacaagaaagctaataaaggttttgatatggacatctattcttttaagtaaacttcaatgaaaatatatgagtagagcatatagagatgtaaataatttgtggacacaccacagactgaaatagcaaatttaaaagaaattgttggaagaatcaagtgtttgtggaatgagtcctcctagtaaagttcctgctcttgtgaataattaagcctcatgtataattactatagcaaaaggaagcctaagaagtattagactctacttgtatttaaattacattttacataatttatgtgtatgaaaaatgttttaaatgcttattttcgtaagccatgagatagctcctttatattttaagaatttctgaattaatttgcttggattttattagtgcaaatggcagagctagcaattcctttttctgtgttcccattccatcctattcatccctcttttaggaaactctgaactctggattgtccttgtttacatacctgcctcctgcattggactatgtgtctctgagtgtagtatgactaattcatttgtttgtcaaggactctcaatgcatttgttgaacagcctaattagtaatgtctgcaacaatgacattttactgtatttaataaagctctgggaaagtaggatacacataagacaggtctaggtctaaattctttacagaaacttggatttttagttcggtttgaaatttgaagatgtgagtatatttatctcagtttcccaaaggacaagctaattggaattatcatcctctttcacttgattggatccccagaatgccatttacgcatgcagcaggattttataacagttttaaattctgtatatttgatgaagaggttttatatttttggattcaagcctctttttaaacttctacaatatggtttacaataattccttatatcctgcttttgaaatacatattacaactttttaagtttggaaggctatatttcaaggactgaagttacagtatactcaagtgatacacaagcctagcaccccactttccacatagtgttcgataaagattgataaactcgaaatcacagaccttttaattcttaagacaaatagcagcagaaagaaacatctttggcttatttctggtaaggtttttatgctctgtaaaacaaagaattgtattcatccgcgcagcacagattctattaaaaataaatgtgagagtcgttaatgtagtactgctcatttaccatcaaaattcacttttcaggaataatcccatcagtttaaattggatattggaatgagcattgattacatttaacttggtagcccaaaatttcttcatggggttttgaactcggcgggatttcaaaggttttaaaaatgagtttttgattttttttaaaaccctcaaatttcattacctttaaactaggtcgaaacggggcgcaagagattggattaacaccatagtaatacttattttgttcttaaccatttcagggcttcttgaaatagaggctgtatggtgtaatggaaaaaacagccttggaatctgggagcctgattcctggattcagtcccagttttgcgtgaccttgggcaagttactttacttctctgaatttccgtttcctcctctgcaaaatgaggatcgcaatagccaccttgcaaccttgactggagcgagcctcgcacaccccgcgccggcctggaggaagagcagccatgattacgccgccttcgctccgctacccgcttgcggctggcgccctcctccagcaggtgtaggcgctgccgcgctgccccacgcctttccgccgctcgcgggcctgcgcctcggcgtccccgaggaggccgctgcgggctgaggtagcgcaccggcctctcggcgtcccagtccggtcccgggcggagggaaagcgggcgacccacctccgaggcagaagccgaggcccggccccgccgagtgcggaggagcgcaggcagcccccgcccctcggccctccccccggccctcccggccctccctccgccccctccgccctcgcgcgccgcccgcccgggtcgccgcggggccgtggtgtacgtgcagagcgcgcagagcgagtggcgcccgtatgccctgcgctcctccacagcctgggccgggccgcccgggacgctgaggcggcggcggcggccgagggggccggtcttgcgctccccaggcccgcgcgcctgagcccaggttgccattcgccgcacaggccctattctctcagccctcggcggcgatgaggcgctgaggcggctgccggcgctgcgccggagcttaggactcggaagcggccgggccgagggcgtggggtgccggcctccctgaggcgagggtagcgggtgcatggcgcagtaacggcccctatctctctccccgctccccagcctcgggcgaggccgtccggccgctacccctcctgctcggccgccgcagtcgccgtcgccgccgccgccgccgccatggccaatgacagcggcgggcccggcgggccgagcccgagcgagcgagaccggcagtactgcgagctgtgcgggaagatggagaacctgctgcgctgcagccgctgccgcagctccttctactgctgcaaggagcaccagcgtcaggactggaagaagcacaagctcgtgtgccagggcagcgagggcgccctcggccacggagtgggcccacaccagcattccggccccgcgccgccggctgcagtgccgccgcccagggccggggcccgggagcccaggaaggcagcggcgcgccgggacaacgcctccggggacgcggccaagggaaaagtaaaggccaagcccccggccgacccagcggcggccgcgtcgccgtgtcgtgcggccgccggcggccagggctcggcggtggctgccgaagccgagcccggcaaggaggagccgccggcccgctcatcgctgttccaggagaaggcgaacctgtaccccccaagcaacacgcccggggatgcgctgagccccggcggcggcctgcggcccaacgggcagacgaagcccctgccggcgctgaagctggcgctcgagtacatcgtgccgtgcatgaacaagcacggcatctgtgtggtggacgacttcctcggcaaggagaccggacagcagatcggcgacgaggtgcgcgccctgcacgacaccgggaagttcacggacgggcagctggtcagccagaagagtgactcgtccaaggacatccgaggcgataagatcacctggatcgagggcaaggagcccggctgcgaaaccattgggctgctcatgagcagcatggacgacctgatacgccactgtaacgggaagctgggcagctacaaaatcaatggccggacgaaagccatggttgcttgttatccgggcaatggaacgggttatgtacgtcatgttgataatccaaatggagatggaagatgtgtgacatgtatatattatcttaataaagactgggatgccaaggtaagtggaggtatacttcgaatttttccagaaggcaaagcccagtttgctgacattgaacccaaatttgatagactgctgtttttctggtctgaccgtcgcaaccctcatgaagtacaaccagcatatgctacaaggtacgcaataactgtttggtattttgatgcagatgagagagcacgagctaaagtaaaatatctaacaggtgaaaaaggtgtgagggttgaactcaataaaccttcagattcggtcggtaaagacgtcttctagagcctttgatccagcaataccccacttcacctacaatattgttaactatttgttaacttgtgaatacgaataaatgggataaagaaaaatagacaaccagttcgcattttaataaggaaacagaaacaactttttgtgttgcatcaaacagaagattttgactgctgtgactttgtactgcatgatcaacttcaaatctgtgattgcttacaggaggaagataagctactaattgaaaatggtttttacatctggatatgaaataagtgccctgtgtagaatttttttcattcttatattttgccagatctgttatctagctgagttcatttcatctctcccttttttatatcaagtttgaatttgggataatttttctatattaggtacaatttatctaaactgaattgagaaaaaattacagtattattcctcaaaataacatcaatctatttttgtaaacctgttcatactattaaattttgccctaaaagacctcttaataatgattgttgccagtgactgatgattaattttattttacttaaaataagaaaaggagcactttaattacaactgaaaaatcagattgttttgcagtccttccttacactaatttgaactcttaaagattgctgctttttttttgacattgtcaataacgaaacctaattgtaaaacagtcaccatttactaccaataacttttagttaatgttttacaagg

SEQ ID NO: 242 - DNA, 3769 bp, Homo sapiens; identical to SEQ ID NO: 144

SEQ ID NO: 243 - DNA, 7522 bp, Homo sapiens
cccgggcgagcccgccgtgcgcacagctctgcccgccgcccctggagcggatccccagccgtccctgggcgttctcccgggttctagcaaagccccccggggtgcccatcagtttccttgggtgactacagcgtgtgttttttctttcctctttcccctgcctgtgtgcccttctccaggatggcagaggcggaattgcacaaggaaaggctgcaagccatagcagaaaaaagaaagaggcagactgaaatagaaggcaagcgacaacagcttgacgagcagatacttctgctgcagcattccaagtccaaagtgcttcgggagaaatggctgctgcagggcatacccgctggaactgccgaagaggaggaagccaggaggcggcagtctgaagaggatgagttcagagtcaagcaacttgaagataacattcagaggctggagcaagaaatacaaacgctagaaagtgaagagtcccagatatctgccaaagagcaaatcatcctagagaaactgaaggaaacagaaaaatccttcaaggactttcagaagggtttctccagtacggatggagatgcagtaaattacatttcctcccagcttcccgacctgccaatcctctgttcacgaacagcagaaccatcacctgggcaggacgggaccagcagagcggctggagtcgggtgggagaatgtgctgctaaaggaaggtgagtcagcctcgaacgccacagaaacatccggcccagacatgactatcaagaagcctccccagctttctgaggatgatatctggctaaaaagcgagggagacaactatagtgccaccctcctggagcctgctgccagctctctttccccagatcacaaaaacatggaaattgaggtgtctgttgcagaatgtaaaagtgttcctggaatcacctctaccccacatcccatggaccatccctccgctttctattcacccccgcataatggcctccttactgatcaccacgaatccctggataatgatgttgccagagagatccgctatctagatgaggtgctagaggccaactgctgtgattctgctgtggatggaacgtacaatggaacatcctccccagagcctggtgcagtggttctggtgggcggcctaagcccccctgtccacgaggcgacccagccagaacccactgaaagaacagctagccggcaggcacctcctcacatcgagctcagtaatagcagccctgaccccatggcagaggcagaaagaacaaatggccattcccccagccagcctagagatgcgctgggggacagcctgcaggtgcctgtcagccccagctccacaaccagctcacggtgttcttcccgagatggagagttcactctcaccacactgaaaaaggaggccaagtttgagctgcgtgccttccatgaggacaagaagccctccaagctctttgaggatgacgagcatgagaaagaacaatactgcattagaaaagtgaggccttcagaggagatgctggagctggaaaaggagaggagagagctcatccgcagccaggccgtcaagaagaatcctggcattgcagcaaaatggtggaatcccccgcaggaaaaaaccatcgaggagcagctggacgaggaacatctggagtcgcacaaaaagtacaaggagcgcaaagagagaagggcacagcaggaacagttgctgctgcagaagcagttacagcagcagcagcagcagcccccatcgcagctctgcacagcccctgcctcttctcatgaacgcgcaagcatgattgacaaagcaaaggaggacattgtcacagagcagatagatttctctgctgctcgcaaacaatttcagctgatggagaattccaggcaagcggtggccaagggccagagtacacccaggctgttctccatcaagcctttctacaggcctctggggtcagtcaactcagacaagccactgactaatccgagaccaccttctgtcgggggacctccagaagacagtggtgcctcagccgccaagggacagaaatcccccggtgccctggagaccccatcggcagcaggaagccagggcaacacagcctctcaggggaaggaagggccctacagcgagccttctaaacgtgggcccttatctaaactgtgggctgaggatggagaatttacgagcgcccgggctgtcctcactgtggtcaaggatgatgaccatgggattttggatcagttctcaagatctgtcaatgtctccttgacccaagaggagcttgactctggtctggacgaattgtcggtgaggtctcaggataccacagtcctggagaccctatccaatgatttcagcatggacaacatcagtgacagcggggcatccaatgagacaaccaatgccctccaggaaaattcactggctgatttttctctgccccagacaccacaaactgacaacccctcagagggccgaggagaaggcgtctccaagtcatttagtgatcatggtttctattccccttcctccacgctgggggactctccgttggttgatgaccccttggagtatcaggctggcctcctggtgcagaatgccattcaacaagccatagccgagcaggtggataaagctgtgtccaaaaccagcagggatggagcagagcaacagggacctgaagcgactgtagaggaagctgaagctgcggctttcggctcagaaaagcctcagagcatgtttgagccacctcaggtgtcttctcctgttcaagagaaaagggatgtattaccaaagattctgcctgctgaagacagggcgctcagggaaagggggcccccccagccactgccagctgtgcagcccagtggcccgattaacatggaggagaccaggcccgaaggaagctatttcagcaagtactcggaggcagctgagctgagaagcacagcctccctcctggccactcaagaatctgacgtgatggttgggcctttcaagctgaggtccaggaaacagcggactttgtccatgattgaggaagagatccgagcagctcaggaaagggaagaggagctgaagaggcagagacaagtcttgcagagtacgcagagccccaggacaaagaatgccccatcactgccctccagaacatgctacaaaactgctccagggaaaatagagaaagtcaaacctcctccatcccccaccactgaaggccccagcttgcagcctgacttagcccctgaagaggctgccggaacccagcggcccaagaatctgatgcagaccctcatggaagactatgagacacacaaatctaaaaggcgcgagagaatggatgatagtagttacacttctaagttactgtcttgcaaggtgacttccgaggtcctcgaggccacacgggttaatcgaagaaagagcgcactggctttgcgctgggaagcagggatctatgccaaccaggaggaagaagacaacgaataaacttccttcaacccaggaagcgtctttggtgcttgggagaccaagaaaccaagaaattaacaactgaaagcattttaatggactatttattaaagtgcaaacaaactcagcaatccttatgtagaccagaagctgcaatatacaatgatgaaaatgaaacgaaaaggaagtccccccatcagactctggacacccaggaatcaaaagagaaaggacttttttggtgactcaatcccagtgtctggtttggggccaatctacaatggatccaaaaggacaaaacatgttacaagcaaatcaacatagttgctgcaggcggaactgagaccagcctctctgggcgatgaaggacaatggtggtagggccacttagagagcagtagggcccaggctggtgcagcctacatggcacaggatatttccctgcaccagtttcccacctgtcacttgcagcatcagagggtgttgcattaactccattttctccagcagccataaaatgaatggcgtttctctccatatttgcccagaagaggcagttatgattccacttctcctacatttaattatttttaattgagaacaactcatgatcacaattcataaaatccatattttaagacaatagttcttcatgtcacaaacacaatctattctacatgaggaggctgagaaaggggaagagaaaaacaaaccaaatggatgatgttagctttaggatcgtgtctgcttataatattcactgatctgcagtttatgagaacacattttcacagttatgtttcttcataggaaaactatatttagtgggcaacaactatttttatgatgggatgggggagtatatacacgtatagaatctgtacgcgttgaacaacttggttcaagatggtgggggcatttttagagcggcaataattgaaaaaaaaggcgaactctgccttggagaggtagatgataagaaataaaaaggtgtttataactattttgtattataaagtgggccttagagataggaagaagaatgatggattccttttggatcaatcagaaaggaaacacgaaagaaaagtcaggaaggtagagagagaaaaagggagggaaggagaaagaatgggaataaaataaggaggtaagagatactatttttgctgagcaaccagtgtgtttcaggatgatacaaagaaaaatatagaatagaaataagtgcaggcttggaatcagctacaaatcctaaagatggggtgtgtgtggatgtgtgtgtgtgtgtgtgtacaccattgtgtgtttgtaaaatgtgtatgttcatgagtaagggtgtgtgtgtgtgtgtattaaaattccagagtgaccgtggcacttgggtgtacaggtaattcctccagagctgtttgctggcttcaggagtggagtgagaatttcttttttatgaaaagggatataaaggcaccgagctgatgcagtatttgtaatattaagttgacctaacaaggtatttgcatgagtcacaattacaaagttttgagcggttttgtaatttgacatttaggagagtctcctatttattctcatactttacattcatgcttagtatactatagaggatgccagctttaatctttctgtcatttaaagcaatatgataagggtattcaataattgggtgccctaaatttctggatgagaaaattttcaattctggccatgagaaagaaaaaaaaataaacagccttctttttttttcctttgttttaaaactgtggttttttaaaaaagcaataattaactcagacctcactaaaaatcatttttgtttttatattgttatgtcataagctctattatgttattctaacaagtagcaatttcacaaaatttgtatgtagatgttaacgcacatttcctttgcttcttttattagactagtgttgactttggggggggacatttattcacaaatgagaagtaggcacaaagtaaaaaatggaaccatctactaacaaggatcctttaaaactgccaagggagctctaacttgaagccacatcctacagatggcagcccaaatagcacatgggcaattggcaccatctttatatggttgagtctcctgaatattttgaatgaattctcaacaaaatgtgctagccactggggacgcaaaacaagtaagatccctgttgcaagaaattcattttatagtgagggaggttggcatggagactaaaattctcaggaaaatgagatccgtgttagattagaagtcctgatgtgaaatgggaggactcaggaaggaggatcgtctttacctgaggatttctagccagaggtcccagatgcctgggctgagaacccagcgataagggggcgttcccaaagcagacacagggataagaacagaggaggcagcagcattgcacagccccaggcacagtggcagttaggatggctggagagtaggatagttctatgggttgcccaaaaaatgtgatgcgcttcatgttttctctgactcatggatctggtagagaccatagacatgatatagactaacttccccatttttcacaagaggaaaccatccttatgacttaccttaaagttttttgttctgttttgaaggaaaccatgtgcttcatgaaacctacagttgacaagagaatgtacagctaagagaaaagcttaagaggccacactattcgcggaatggctttagaggcagatgaagtggtctttgaccacagttgattgaaccagagcacttattgcttaaagaataacagagttctagagctgggggttcttgggccatgctccgtgtgtggataaggaaagaaatactgtttctgggactctcccacagtcacaaagctgttttcactgtggcccctacatctcttaacttttgctattactcctatgctgccttccggattactgctgtctatcttcttgctccactcactgaagatcctattataatcccatgaaaatgtaaattacagtttacttgggagagccagattttctctgtgctcttgagttttttattcattcaagaaaccttgggccaccgctttgtacatagcaccgtgctaggctctgggatcccaaatggacccttttaactttctgaagatgggaccgtcccctggaggaaagtcattcctgcctaatccatcgagagaaagaggcttacgaaaaactttgcctctgatgctcagccccacccccaaatagcacacaagcttgttaaccccacctcttacaaaatgtttagattctgtaggtgttaaaagcctttctggaagtattgcattctgccgtgtttataggtgttcactttcctccagagctgattaactactgacatgacttggctttctcatccagaaattatggaaacagggtctgtcagtggcaggaggccgtgctgtgttttacttggatgacacaatgcagtttacttgcctcttcatacccatgcatgctgctcaccctagacaatgacatataagccgtatatagatcaatgtccacatatatatacacacacacatatatatatataaagtgtaacaaggaacactaaaacagtgttgattcttgtctctgaagacaaataattaaaccttttttttcccaactaaagaatggatttaattaaactatgtattgaaaaaaaagtagcctaagtgttagagatggtgaatatattccattttagttaaagaacaaatttcctgaattttaagcattcagtgagctgccaattttgattttgtgttgctctttacccaaattattttttctttgtttttctttttttgggggaggaggggaaaaaagcagcaatactgtgtttggaaattatactctgtatctggttttcctgtgtatgttaaccacttaaatgttattatcctgctttggttttagagtgattgtgaggcattcaatgcaagtatacagttattttctcattaaaatccaatgtgtgttgagtttttataaaaaaaaaaaaaaaaaa

SEQ ID NO: 244 - DNA, 5180 bp, Homo sapiens
cccgggcgagcccgccgtgcgcacagctctgcccgccgcccctggagcggatccccagccgtccctgggcgttctcccgggttctagcaaagccccccggggtgcccatcagtttccttgggtgactacagcgtgtgttttttctttcctctttcccctgcctgtgtgcccttctccaggatggcagaggcggaattgcacaaggaaaggctgcaagccatagcagaaaaaagaaagaggcagactgaaatagaaggcaagcgacaacagcttgacgagcagatacttctgctgcagcattccaagtccaaagtgcttcgggagaaatggctgctgcagggcatacccgctggaactgccgaagaggaggaagccaggaggcggcagtctgaagaggatgagttcagagtcaagcaacttgaagataacattcagaggctggagcaagaaatacaaacgctagaaagtgaagagtcccagatatctgccaaagagcaaatcatcctagagaaactgaaggaaacagaaaaatccttcaaggactttcagaagggtttctccagtacggatggagatgcagtaaattacatttcctcccagcttcccgacctgccaatcctctgttcacgaacagcagaaccatcacctgggcaggacgggaccagcagagcggctggagtcgggtgggagaatgtgctgctaaaggaaggtgagtcagcctcgaacgccacagaaacatccggcccagacatgactatcaagaagcctccccagctttctgaggatgatatctggctaaaaagcgagggagacaactatagtgccaccctcctggagcctgctgccagctctctttccccagatcacaaaaacatggaaattgaggtgtctgttgcagaatgtaaaagtgttcctggaatcacctctaccccacatcccatggaccatccctccgctttctattcacccccgcataatggcctccttactgatcaccacgaatccctggataatgatgttgccagagagatccgctatctagatgaggtgctagaggccaactgctgtgattctgctgtggatggaacgtacaatggaacatcctccccagagcctggtgcagtggttctggtgggcggcctaagcccccctgtccacgaggcgacccagccagaacccactgaaagaacagctagccggcaggcacctcctcacatcgagctcagtaatagcagccctgaccccatggcagaggcagaaagaacaaatggccattcccccagccagcctagagatgcgctgggggacagcctgcaggtgcctgtcagccccagctccacaaccagctcacggtgttcttcccgagatggagagttcactctcaccacactgaaaaaggaggccaagtttgagctgcgtgccttccatgaggacaagaagccctccaagctctttgaggatgacgagcatgagaaagaacaatactgcattagaaaagtgaggccttcagaggagatgctggagctggaaaaggagaggagagagctcatccgcagccaggccgtcaagaagaatcctggcattgcagcaaaatggtggaatcccccgcaggaaaaaaccatcgaggagcagctggacgaggaacatctggagtcgcacaaaaagtacaaggagcgcaaagagagaagggcacagcaggaacagttgctgctgcagaagcagttacagcagcagcagcagcagcccccatcgcagctctgcacagcccctgcctcttctcatgaacgcgcaagcatgattgacaaagcaaaggaggacattgtcacagagcagatagatttctctgctgctcgcaaacaatttcagctgatggagaattccaggcaagcggtggccaagggccagagtacacccaggctgttctccatcaagcctttctacaggcctctggggtcagtcaactcagacaagccactgactaatccgagaccaccttctgtcgggggacctccagaagacagtggtgcctcagccgccaagggacagaaatcccccggtgccctggagaccccatcggcagcaggaagccagggcaacacagcctctcaggggaaggaagggccctacagcgagccttctaaacgtgggcccttatctaaactgtgggctgaggatggagaatttacgagcgcccgggctgtcctcactgtggtcaaggatgatgaccatgggattttggatcagttctcaagatctgtcaatgtctccttgacccaagaggagcttgactctggtctggacgaattgtcggtgaggtctcaggataccacagtcctggagaccctatccaatgatttcagcatggacaacatcagtgacagcggggcatccaatgagacaaccaatgccctccaggaaaattcactggctgatttttctctgccccagacaccacaaactgacaacccctcagagggccgaggagaaggcgtctccaagtcatttagtgatcatggtttctattccccttcctccacgctgggggactctccgttggttgatgaccccttggagtatcaggctggcctcctggtgcagaatgccattcaacaagccatagccgagcaggtggataaagctgtgtccaaaaccagcagggatggagcagagcaacagggacctgaagcgactgtagaggaagctgaagctgcggctttcggctcagaaaagcctcagagcatgtttgagccacctcaggtgtcttctcctgttcaagagaaaagggatgtattaccaaagattctgcctgctgaagacagggcgctcagggaaagggggcccccccagccactgccagctgtgcagcccagtggcccgattaacatggaggagaccaggcccgaaggaagctatttcagcaagtactcggaggcagctgagctgagaagcacagcctccctcctggccactcaagaatctgacgtgatggttgggcctttcaagctgaggtccaggaaacagcggactttgtccatgattgaggaagagatccgagcagctcaggaaagggaagaggagctgaagaggcagagacaagtcttgcagagtacgcagagccccaggacaaagaatgccccatcactgccctccagaacatgctacaaaactgctccagggaaaatagagaaagtcaaacctcctccatcccccaccactgaaggccccagcttgcagcctgacttagcccctgaagaggctgccggaacccagcggcccaagaatctgatgcagaccctcatggaagactatgagacacacaaatctaaaaggcgcgagagaatggatgatagtagtgtcctcgaggccacacgggttaatcgaagaaagagcgcactggctttgcgctgggaagcagggatctatgccaaccaggaggaagaagacaacgaataaacttccttcaacccaggaagcgtctttggtgcttgggagaccaagaaaccaagaaattaacaactgaaagcattttaatggactatttattaaagtgcaaacaaactcagcaatccttatgtagaccagaagctgcaatatacaatgatgaaaatgaaacgaaaaggaagtccccccatcagactctggacacccaggaatcaaaagagaaaggacttttttggtgactcaatcccagtgtctggtttggggccaatctacaatggatccaaaaggacaaaacatgttacaagcaaatcaacatagttgctgcaggcggaactgagaccagcctctctgggcgatgaaggacaatggtggtagggccacttagagagcagtagggcccaggctggtgcagcctacatggcacaggatatttccctgcaccagtttcccacctgtcacttgcagcatcagagggtgttgcattaactccattttctccagcagccataaaatgaatggcgtttctctccatatttgcccagaagaggcagttatgattccacttctcctacatttaattatttttaattgagaacaactcatgatcacaattcataaaatccatattttaagacaatagttcttcatgtcacaaacacaatctattctacatgaggaggctgagaaaggggaagagaaaaacaaaccaaatggatgatgttagctttaggatcgtgtctgcttataatattcactgatctgcagtttatgagaacacattttcacagttatgtttcttcataggaaaactatatttagtgggcaacaactatttttatgatgggatgggggagtatatacacgtatagaatctgtacgcgttgaacaacttggttcaagatggtgggggcatttttagagcggcaataattgaaaaaaaaggcgaactctgccttggagaggtagatgataagaaataaaaaggtgtttataactattttgtattataaagtgggccttagagataggaagaagaatgatggattccttttggatcaatcagaaaggaaacacgaaagaaaagtcaggaaggtagagagagaaaaagggagggaaggagaaagaatgggaataaaataaggaggtaagagatactatttttgctgagcaaccagtgtgtttcaggatgatacaaagaaaaatatagaatagaaataagtgcaggcttggaatcagctacaaatcctaaagatggggtgtgtgtggatgtgtgtgtgtgtgtgtgtacaccattgtgtgtttgtaaaatgtgtatgttcatgagtaagggtgtgtgtgtgtgtgtattaaaattccagagtgaccgtggcacttgggtgtacaggtaattcctccagagctgtttgctggcttcaggagtggagtgagaatttcttttttatgaaaagggatataaaggcaccgagctgatgcagtatttgtaatattaagttgacctaacaaggtatttgcatgagtcacaattacaaagttttgagcggttttgtaatttgacatttaggagagtctcctatttattctcatactttacattcatgcttagtatactatagaggatgccagctttaatctttctgtcatttaaagcaatatgataagggtattcaataattgggtgccctaaatttctggatgagaaaattttcaattctggccatgagaaaaaaaaaaaaaaaaaa

SEQ ID NO: 245 - DNA, 1427 bp, Homo sapiens; identical to SEQ ID NO: 179

SEQ ID NO: 246 - DNA, 1395 bp, Homo sapiens
accggcgtattcccgccctgcttttcgcccgccgttccgtggcgggaactgaggcgactgtggggacatcagtgatcggtgacggagctaagacttcgagaccatctcgtcctttttgtatcgcggaaacctgaggaacgagccggcggcggtgacctgcacgagaagccaggctaactgggtgaagtaccatgcaagcatttcttaaaggtacatccatcagtactaaacccccgctgaccaaggatcgaggagtagctgccagtgcgggaagtagcggagagaacaagaaagccaaacccgttccctgggtggaaaaatatcgcccaaaatgtgtggatgaagttgctttccaggaagaagtggttgcagtgctgaaaaaatctttagaaggagcagatcttcctaatctcttgttttacggaccacctggaactggaaaaacatccactattttggcagcagctagagaactctttgggcctgaacttttccgattaagagttcttgagttaaatgcatctgatgaacgtggaatacaagtagttcgagagaaagtgaaaaattttgctcaattaactgtgtcaggaagtcgctcagatgggaagccgtgtccgccttttaagattgtgattctggatgaagcagattctatgacctcagctgctcaggcagctttaagacgtaccatggagaaggagtcgaaaaccacccgattctgtcttatctgtaactatgtcagtcgaataattgaacccctgacctctagatgttcaaaattccgcttcaagcctctgtcagataaaattcaacagcagcgattactagacattgccaagaaggaaaatgtcaaaattagtgatgagggaatagcttatcttgttaaagtgtcagaaggagacttaagaaaagccattacatttcttcaaagcgctactcgattaacaggtggaaaggagatcacagagaaagtgattacagacattgccggggtaataccagctgagaaaattgatggagtatttgctgcctgtcagagtggctcttttgacaaactagaagctgtggtcaaggatttaatagatgagggtcatgcagcaactcagctcgtcaatcaactccatgatgtggttgtagaaaataacttatctgataaacagaagtctattatcacagaaaaacttgccgaagttgacaaatgcctagcagatggtgctgatgaacatttgcaactcatcagcctttgtgcaactgtgatgcagcagttatctcagaattgttaacgtgaatatatctggatggggggttttgtaaataatgaagttgtaataaaaataaaatgaccaaaagcacctttaaaaaaaaaaaaaaaaaaaaaaaaaaaaaaaaaaaaaa

SEQ ID NO: 247 - DNA, 3915 bp, Homo sapiens
gtggggtggggtggggctgggggcttgtcgccctttcaggctccaccctttgcggagattataaatagtcatgatcccagcgagacccagagatgcctgtaatggtgagactttggatccttcctgaggacgtggagaaaactttctgctgagaaggacattttgaaggttttgttggctgaaaaagctgtttctggaatcacccctagatctttcttgaagacttgaattagattacagcgatggggacacagaaggtcaccccagctctgatatttgccatcacagttgctacaatcggctctttccaatttggctacaacactggggtcatcaatgctcctgagaagatcataaaggaatttatcaataaaactttgacggacaagggaaatgccccaccctctgaggtgctgctcacgtctctctggtccttgtctgtggccatattttccgtcgggggtatgatcggctccttttccgtcggactcttcgtcaaccgctttggcaggcgcaattcaatgctgattgtcaacctgttggctgtcactggtggctgctttatgggactgtgtaaagtagctaagtcggttgaaatgctgatcctgggtcgcttggttattggcctcttctgcggactctgcacaggttttgtgcccatgtacattggagagatctcgcctactgccctgcggggtgcctttggcactctcaaccagctgggcatcgttgttggaattctggtggcccagatctttggtctggaattcatccttgggtctgaagagctatggccgctgctactgggttttaccatccttcctgctatcctacaaagtgcagcccttccattttgccctgaaagtcccagatttttgctcattaacagaaaagaagaggagaatgctaagcagatcctccagcggttgtggggcacccaggatgtatcccaagacatccaggagatgaaagatgagagtgcaaggatgtcacaagaaaagcaagtcaccgtgctagagctctttagagtgtccagctaccgacagcccatcatcatttccattgtgctccagctctctcagcagctctctgggatcaatgctgtgttctattactcaacaggaatcttcaaggatgcaggtgttcaagagcccatctatgccaccatcggcgcgggtgtggttaatactatcttcactgtagtttctctatttctggtggaaagggcaggaagaaggactctgcatatgataggccttggagggatggctttttgttccacgctcatgactgtttctttgttattaaaggataactataatgggatgagctttgtctgtattggggctatcttggtctttgtagccttctttgaaattggaccaggccccattccctggtttattgtggccgaactcttcagccagggcccccgcccagctgcgatggcagtggccggctgctccaactggacctccaacttcctagtcggattgctcttcccctccgctgctcactatttaggagcctacgtttttattatcttcaccggcttcctcattaccttcttggcttttaccttcttcaaagtccctgagacccgtggcaggacttttgaggatatcacacgggcctttgaagggcaggcacacggtgcagatagatctggaaaggacggcgtcatggagatgaacagcatcgagcctgctaaggagaccaccaccaatgtctaagtcgtgcctccttccacctccctcccggcatgggaaagccacctctccctcaacaagggagagacctcatcaggatgaacccaggacgcttctgaatgctgctacttaattcctttctcatcccacgcactccatgagcaccccaaggctgcggtttgttggatcttcaatggctttttaaattttatttcctggacatcctcttctgcttaggagagaccgagtgaacctaccttcatttcaggagggattggccgcttggcacatgacaactttgccagcttttcctcccttgggttctgatattgccgcactaggggatataggagaggaaaagtaaggtgcagttcccccaacctcagacttaccaggaagcagatacatatgagtgtggaagccggagggtgtttatgtaagagcaccttcctcacttccatacagctctacgtggcaaattaacttgagttttatttattttatcctctggtttaattacataatttttttttttttactttaagtttcaggatacatgtgccgaatgtgcaggtttgttacataggtatatatatgccatgatggaaatatttatttttttaagcgtaattttgccaaataataaaaacagaaggaaattgagattagagggaggtgtttaaagagaggttatagagtagaagatttgatgctggagaggttaaggtgcaataagaatttagggagaaatgttgttcattattggagggtaaatgatgtggtgcctgaggtctgtacgttacctcttaacaatttctgtccttcagatggaaactctttaacttctcgtaaaagtcatatacctatataataaagctactgatttccttggagcttttttctttaagataatagtttacatgtagtagtacttgaaatctaggattattaactaatatgggcattgtagttaatgatggttgatgggttctaattttggatggagtccagggaagagaaagtgatttctagaaagcctgttcccctcactggatgaaataactccttcttgtagtagtctcattacttttgaagtaatcccgccacctatctcgtgggagagccatccaaataagaaacctaaaataattggttcttggtagagattcattatttttccactttgttctttaggagattttaggtgttgattttctgttgtattttaactcatacctttaaaggaattccccaaagaatgtttatagcaaacttggaatttgtaacctcagctctgggagaggatttttttctgagcgattattatctaaagtgtgttgttgctttaggctcacggcacgcttgcgtatgtctgttaccatgtcactgtggtcctatgccgaatgccctcaggggacttgaatctttccaataaaccaggtttagacagtatgagtcaatgtgcagtgtagcccacacttgagaggatgaatgtatgtgcactgtcactttgctctgggtggaagtacgttattgttgacttattttctctgtgtttgttcctacagcccctttttcatatgttgctcagtctccctttcccttcttggtgcttacacatctcagaccctttagccaaacccttgtcagtgacagtattttggttcttagttctcactgttccctctgctcctggagcctttgaataaaaatgcacgtagctgaggccggatgcggtggctcacgcctgtaatcccagcactttgggaggcctaggcgggcggtcaggggttcgagaccagtctggccaacatcgtgaaaccctgtctctactaaaaatgcaaaaattagccgggcgtggtggcgggcgcctgtaatcccagctacttgggaagctgaggcgggagaatcatgtgaacccgggacgcaggggttgcagtgagcggagatcgcatcattgcactctagcctgggccacagggcgagactccgtctcaaaaaaaaaaaaatgcacatagctatcgagtgtgctttagcttgaaaaggtgaccttgcaacttcatgtcaactttctggctcctcaaacagtaggttggcagtaaggcagggtcccatttctcactgagaagattgtgaatatttccatatggattttctattgttactctggttctttgttttaaaataaaaattctgaatgtacacg

SEQ ID NO: 248 - DNA, 1416 bp, Homo sapiens
ggaggggaggggcgcggccgccggacgcgccctcgcagcttccgccgggcccctccggaaatcccgtatcgtagggcgacggcggcttagaaagtgcttcctggagcgcagacgaggtcatgaatcatgtgacggtggcttgaggaggaacctgtctttaaagctgtccctgaagtgacagcggagagaaccaggcagcccagaaaccccaggcgtggagattgatcctgcgagagaagggggttcatcatggcggatgacctaaagcgattcttgtataaaaagttaccaagtgttgaagggctccatgccattgttgtgtcagatagagatggagtacctgttattaaagtggcaaatgacaatgctccagagcatgctttgcgacctggtttcttatccacttttgcccttgcaacagaccaaggaagcaaacttggactttccaaaaataaaagtatcatctgttactataacacctaccaggtggttcaatttaatcgtttacctttggtggtgagtttcatagccagcagcagtgccaatacaggactaattgtcagcctagaaaaggaacttgctccattgtttgaagaactgagacaagttgtggaagtttcttaatctgacagtggtttcagtgtgtaccttatcttcattataacaacacaatatcaatccagcaatctttagactacaataatacttttatccatgtgctcaagaaagggcccctttttccaacttatactaaagagctagcatatagatgtaatttatagatagatcagttgctatattttctggtgtagggtctttcttatttagtgagatctagggataccacagaaatggttcagtctatcacagctcccatggagttagtctggtcaccagatatggatgagagattctattcagtggatcagaatcaaactggtacattgatccacttgagccgttaagtgctgccaattgtacaatatgcccaggcttgcagaataaagccaactttttattgtgaataataataaggacatatttttcttcagattatgttttatttctttgcattgagtgaggaacataaaatggcttggtaaaagtaataaaatcagtacaatcactaactttcctttgtacatattattttgcagtatagatgaatattactaatcagtttgattattctcagagggtgctgctctttaatgaaaatgaaaattatagctaatgttttttcctcaaactctgctttctgtaaccaatcagtgttttaatgtttgtgtgttcttcataaaatttaaatacaattcgttattctgtttccaatgttagtatgtatgtaaacatgatagtacagccatttttttcatatgtgagtaaaaataaaatagtatttttaaaaataaaaaa

SEQ ID NO: 249 - DNA, 1720 bp, Homo sapiens
gactgcagatgaaattagtaactggtggggtcgtggggtgtgaatggtgggcgggagcagctatgtcagttggtgtgtttctgcttatgttagggtaattgggcacggcctttgtgtaactggtgaatatctctgaacctgggcatgaaacagagagatgtcctaactctgggtgagaggaatcctcatttttctctgccctctcactgtggcatcctaagaaaaaagttttgggttcctgcagcatgaaggagagctctgctcccagaatttgggagctccagatttcttccagggtgtggaggcatcaatatatcagtctgggaaaggggttcctgggccactccaggagctgagttgggtggaaggtgctgagagtgtgggtgggggccacttctgagcacccatgtggcacccactgctggtccctgtttgtggctgggcactcaggaaaatgtttttggtgctaagagtaaaaagccaaccaacaaacacatctcttttttctgtctattcactggaaagtaaaagcagtctgggcgcaggctggggacccagatggaattcaaacttatgcctgctctcaaggtgctcacggttgctgataaacagctggataaaatgaagagtctatgagtgagggatgcagagccagggaaggctggtggagtgatgccaccagcacaggggtatgagtttgcagctgccaaggggccaagggatgagctggggccctccttcccaatggcatctccccctggtctggaactgaagacactgagcaatggtccccaagccccaaggagatcagctcccctgggcccagtggccccaaccagggagggtgtggagaatgcctgcttctcctcagaggagcatgagacccatttccagaaccctgggaacacgagactgggcagctcacccagtccccctgggggtgtctcctcactgccccgatcccagcgggatgatctgtcccttcattcagaggaggggccagccctggagcccgtgagccgcccggtggattatggctttgtttccgccctcgttttcctggtgagtgggattcttctggtggtgacagcatacgccatcccccgtgaggctcgagtcaatccggacacagtgacagcgcgggagatggaacgactggagatgtactacgcccgcctaggctcccacctggacaggtgcatcatcgcaggcctcgggctgctcacggtgggcggcatgctcttgtcggtgctgctcatggtctccctgtgcaagggcgagctgtaccgccggaggaccttcgtccccggcaagggctccaggaagacctacggctccattaacctgcgcatgagacagctcaatggggatgggggccaggccctggtggagaatgaagttgtccaggtctcagagactagccacaccctccagaggtcttaagaactagcccaccttatctggctgctttagctccagtgctacaaggtccaccccctgctcccgcccacctgacccctgccaaggccctggggttttaaactgagctcacatagggccttgtggaagaagtactgggtgctggagggagagctcggggcccagcccatgccccacacgggcaagcagcccactgatctgttttgtagctgaggttttgcatacggttttgtttggaggatggcttctgctgctaaaaatacaaaagtttggaaaccgc

SEQ ID NO: 250 - DNA, 6316 bp, Homo sapiens
tagtctctttggaaacttctgcaggggaaaagagctaggaaagagctgcaaagcagtgtgggctttttcccttttttgctccttttcattacccctcctccgttttcacccttctccggacttcgcgtagaacctgcgaatttcgaagaggaggtggcaaagtgggagaaaagaggtgttagggtttggggtttttttgtttttgtttttgttttttaatttcttgatttcaacattttctcccaccctctcggctgcagccaacgcctcttacctgttctgcggcgccgcgcaccgctggcagctgagggttagaaagcggggtgtattttagattttaagcaaaaattttaaagataaatccatttttctctcccacccccaacgccatctccactgcatccgatctcattatttcggtggttgcttgggggtgaacaattttgtggctttttttcccctataattctgacccgctcaggcttgagggtttctccggcctccgctcactgcgtgcacctggcgctgccctgcttcccccaacctgttgcaaggctttaattcttgcaactgggacctgctcgcaggcaccccagccctccacctctctctacatttttgcaagtgtctgggggagggcacctgctctacctgccagaaattttaaaacaaaaacaaaaacaaaaaaatctccgggggccctcttggcccctttatccctgcactctcgctctcctgccccaccccgaggtaaagggggcgactaagagaagatggtgttgctcaccgcggtcctcctgctgctggccgcctatgcggggccggcccagagcctgggctccttcgtgcactgcgagccctgcgacgagaaagccctctccatgtgcccccccagccccctgggctgcgagctggtcaaggagccgggctgcggctgctgcatgacctgcgccctggccgaggggcagtcgtgcggcgtctacaccgagcgctgcgcccaggggctgcgctgcctcccccggcaggacgaggagaagccgctgcacgccctgctgcacggccgcggggtttgcctcaacgaaaagagctaccgcgagcaagtcaagatcgagagagactcccgtgagcacgaggagcccaccacctctgagatggccgaggagacctactcccccaagatcttccggcccaaacacacccgcatctccgagctgaaggctgaagcagtgaagaaggaccgcagaaagaagctgacccagtccaagtttgtcgggggagccgagaacactgcccacccccggatcatctctgcacctgagatgagacaggagtctgagcagggcccctgccgcagacacatggaggcttccctgcaggagctcaaagccagcccacgcatggtgccccgtgctgtgtacctgcccaattgtgaccgcaaaggattctacaagagaaagcagtgcaaaccttcccgtggccgcaaacgtggcatctgctggtgcgtggacaagtacgggatgaagctgccaggcatggagtacgttgacggggactttcagtgccacaccttcgacagcagcaacgttgagtgatgcgtccccccccaacctttccctcaccccctcccacccccagccccgactccagccagcgcctccctccaccccaggacgccactcatttcatctcatttaagggaaaaatatatatctatctatttgaggaaactgaggacctcggaatctctagcaagggctcaacttcgaaaatggcaacaacagagatgcaaaaagctaaaaagacaccccccccctttaaatggttttctttttgaggcaagttggatgaacagagaagggaagagaggaagaacgagaggaagagaagggaaggaagtgtttgtgtagaagagagagaaagacgaatagagttaggaaaaggaagacaagcaggtgggcaggaaggacatgcaccgagaccaggcaggggcccaactttcacgtccagccctggcctggggtcgggagaggtgggcgctagaagatgcagcccaggatgtggcaatcaatgacactattggggtttcccaggatggattggtcagggggagaaaggaaaaggcaaaacactccaggacctctcccggatctgtctcctcctctagccagcagtatggacagctggacccctgaacttcctctcctcttacctgggcagagtgttgtctctccccaaatttataaaaactaaaatgcattccattcctctgaaagcaaaacaaattcataattgagtgatattaaatagagaggttttcggaagcagatctgtgaatatgaaatacatgtgcatatttcattccccaggcagacattttttagaaatcaatacatgccccaatattggaaagacttgttcttccacggtgactacagtacatgctgaagcgtgccgtttcagccctcatttaattcaatttgtaagtagcgcagcagcctctgtgggggaggataggctgaaaaaaaaaagtgggctcgtatttatctacaggactccatatagtcatatataggcatataaatctattctttttctttgtttttttctttcttcctttctttcaaaggtttgcattaacttttcaaagtagttcctataggggcattgaggagcttcctcattctgggaaaactgagaaaacccatattctcctaatacaacccgtaatagcatttttgcctgcctcgaggcagagtttcccgtgagcaataaactcagcttttttgtggggcacagtactggatttgacagtgattccccacgtgtgttcatctgcacccaccgagccaggcagaggccagccctccgtggtgcacacagcacgcgcctcagtccatcccattttagtctttaaaccctcaggaagtcacagtctccggacaccacaccacatgagcccaacaggtccacgatggatccaccagtcccaccccagccttttcctttcatctgaacagaatgtgcatttttggaagcctccctcactctccatgctggcagagcaggagggagactgaagtaagagatggcagagggagatggtggcaaaaaggtttagatgcaggagaacagtaagatggatggttccggccagagtcgatgtggggaggaacagagggctgaagggagagggggctgactgttccattctagctttggcacaaagcagcagaaagggggaaaagccaatagaaatttccttagcttccccaccatatgtattttctaggatttgagaggaaagagaggaaaatgggggaatgggttgcaaaatagaaatgagcttaatccaggccgcagagccagggaaggtgagtaactttaggagggtgctagactttagaagccagataggaagaatcagtctaaactggccatgctttggaagggacaagactatgtgctccgctgcccaccttcagcctgcaatgagggactgaggcccacgagtctttccagctcttcctccattctggccagtccctgcatcctccctggggtggaggatggaaggaaagctgggacaagcagggaacgcatgattcagggatgctgtcactcggcagccagattccgaaactcccattctccaatgacttcctcaaccaatgggtggccttgtgactgttctttaaggctgaagatatccaggaaagggggcttggacactggccaaggagaccccttcgtgctgtggacacagctctcttcactctttgctcatggcatgacacagcggagaccgcctccaacaacgaatttggggctacgaagaggaatagcgaaaaagcaaatctgtttcaactgatgggaaccctatagctatagaacttgggggctatctcctatgcccctggacaggacagttggctggggacaggagaagtgctcaatcttcatgagacaaaggggcccgatagggccagcagccacaaggccttgacctgccgagtcagcatgccccatctctctgcacagctgtcccctaaacccaactcacgtttctgtatgtcttaggccagtatcccaaacctcttccacgtcactgttctttccacccattctccctttgcatcttgagcagttatccaactaggatctgccaagtggatactggggtgccactcccctgagaaaagactgagccaggaactacaagctccccccacattcctcccagcctggacctaattcttgagaggggctctctcttcacggactgtgtctggactttgagcaggcttctgccccttgcgttggctctttgctgccagccatcaggtgggggattagagcctggtgtaagtgcgccagactcttccggtttccaaagttcgtgcctgcgaacccaaacctgtgagtctcttctgcatgcaggagtttctcctgggcagctggtcactccccagagaagctgggccttcatggacacatggaactaagcctcccaaatgggagttctggctgagcccagggtggggagatcctgggaagggaggcactggaggaagacggcacctcttcccccatggcagggtgtgagggaggcaggtttggaatggtgcgagtatggcaatctaagcaggggtctggtctctttgactccaggctggcctttggccgactgtctgctcacccagagaccttggactccggactatccatggctccgaatctaagtgctgcccactcccatgctcacacccacagaaggtcttcccatcccctttagattcgtgcctcactccaccagtgaggaagatgcctctgtctttcccacgactgccaggagatagggaagcccagccaggactgaccctccttcctccagcctgccctgacccacctggcaaagcagggcacatggggaggaagagactggaacctttctttgacagccaggcctagacagacaggcctggggacactggccccatgaggggaggaaggcaggcgcacgaggtccagggaggcccttttctgatcatgccccttctctcccaccccatctccccaccaccacctctgtggcctccatggtacccccacagggctggcctcccctagagggtgggcctcaaccacctgctcccgccacgcaccggttagtgagacagggctgccacggcaaccgccaagcccccctcaaggtgggacagtaccccggacccatccactcactcctgagagggctccggcccagaatgggaacctcagagaagagctctaaggagaagaaaccccatagcgtcagagaggatatgtctggcttccaagagaaaggaggctccgttttgcaaagtggaggagggacgagggacaggggtttcaccagccagcaacctgggccttgtactgtctgtgtttttaaaaccactaaagtgcaagaattacattgcactgtttctccactttttattttctcttaggcttttgtttctatttcaaacatactttcttggttttctaatggagtatatagtttagtcatttcacagactctggcctcctctcctgaaatccttttggatggggaaagggaaggtggggagggtccgaggggaaggggaccccagcttccctgtgcccgctcaccccactccaccagtccccggtcgccagccggagtctcctctctaccgccactgtcacaccgtagcccacatggatagcacagttgtcagacaagattccttcagattccgagttgcctaccggttgttttcgttgttgttgttgttgtttttctttttctttttttttttgaagacagcaataaccacagtacatattactgtagttctctatagttttacatacattcataccataactctgttctctcctcttttttgttttcaactttaaaaacaaaaataaacgatgataatctttactggtgaaaaggatggaaaaataaatcaacaaatgcaaccagtttgtgagaaaaaaaaaaaaaagccgaaaaaaaaaaaaaaaacacctgaatgcggaagagctcggctcccgtttagcattttgtacttaaggaaataaaaaaccaacaaaggatctcacattttcttaaaaagtgaagattgctgtatactatttattcaacttataatttatgttactccttgatctttgtcttttgtcatgacaaagcatttatttaataaagttatgcattcagttaaaaaaaaaaaaaaaaaaaaaaaaaaaaaaaaaaaaaaaaaaaaaaaaaaaaaaaaaaaaaaaaaaaaaaaaaaaaaaa

SEQ ID NO: 251 - DNA, 2748 bp, Homo sapiens; identical to SEQ ID NO: 75

SEQ ID NO: 252 - DNA, 2613 bp, Homo sapiens
agcgggtgcggggcgggaccggcccggcctatatattgggttggcgccggcgccagctgagccgagcggtagctggtctggcgaggttttatacacctgaaagaagagaatgtcaagacgaagtagccgtttacaagctaagcagcagccccagcccagccagacggaatccccccaagaagcccagataatccaggccaagaagaggaaaactacccaggatgtcaaaaaaagaagagaggaggtcaccaagaaacatcagtatgaaattaggaattgttggccacctgtattatctggggggatcagtccttgcattatcattgaaacacctcacaaagaaataggaacaagtgatttctccagatttacaaattacagatttaaaaatctttttattaatccttcacctttgcctgatttaagctggggatgttcaaaagaagtctggctaaacatgttaaaaaaggagagcagatatgttcatgacaaacattttgaagttctgcattctgacttggaaccacagatgaggtccatacttctagactggcttttagaggtatgtgaagtatacacacttcatagggaaacattttatcttgcttacgtcactgatggtgcttgcagtgaagaggatatcttaaggatggaactcattatattaaaggctttaaaatgggaactttgtcctgtaacaatcatctcctggctaaatctctttctccaagttgatgctcttaaagatgctcctaaagttcttctacctcagtattctcaggaaacattcattcaaatagctcagcttttagatctgtgtattctagccattgattcattagagttccagtacagaatactgactgctgctgccttgtgccattttacctccattgaagtggttaagaaagcctcaggtttggagtgggacagtatttcagaatgtgtagattggatggtaccttttgtcaatgtagtaaaaagtactagtccagtgaagctgaagacttttaagaagattcctatggaagacagacataatatccagacacatacaaactatttggctatgctggaggaagtaaattacataaacaccttcagaaaagggggacagttgtcaccagtgtgcaatggaggcattatgacaccaccgaagagcactgaaaaaccaccaggaaaacactaaagaagataactaagcaaacaagttggaattcaccaagattgggtagaactggtatcactgaactactaaagttttacagaaagtagtgctgtgattgattgccctagccaattcacaagttacactgccattctgattttaaaacttacaattggcactaaagaatacatttaattatttcctatgttagctgttaaagaaacagcaggacttgtttacaaagatgtcttcattcccaaggttactggatagaagccaaccacagtctataccatagcaatgtttttcctttaatccagtgttactgtgtttatcttgataaactaggaattttgtcactggagttttggactggataagtgctaccttaaagggtatactaagtgatacagtactttgaatctagttgttagattctcaaaattcctacactcttgactagtgcaatttggttcttgaaaattaaatttaaacttgtttacaaaggtttagttttgtaataaggtgactaatttatctatagctgctatagcaagctattataaaacttgaatttctacaaatggtgaaatttaatgttttttaaactagtttatttgccttgccataacacattttttaactaataaggcttagatgaacatggtgttcaacctgtgctctaaacagtgggagtaccaaagaaattataaacaagataaatgctgtggctccttcctaactggggctttcttgacatgtaggttgcttggtaataacctttttgtatatcacaatttgggtgaaaaacttaagtaccctttcaaactatttatatgaggaagtcactttactactctaagatatccctaaggaatttttttttttaatttagtgtgactaaggctttatttatgtttgtgaaactgttaaggtcctttctaaattcctccattgtgagataaggacagtgtcaaagtgataaagcttaacacttgacctaaacttctattttcttaaggaagaagagtattaaatatatactgactcctagaaatctatttattaaaaaaagacatgaaaacttgctgtacataggctagctatttctaaatattttaaattagcttttctaaaaaaaaaatccagcctcataaagtagattagaaaactagattgctagtttattttgttatcagatatgtgaatctcttctccctttgaagaaactatacatttattgttacggtatgaagtcttctgtatagtttgtttttaaactaatatttgtttcagtattttgtctgaaaagaaaacaccactaattgtgtacatatgtattatataaacttaaccttttaatactgtttatttttagcccattgtttaaaaaataaaagttaaaaaaatttaactgcttaaaagtaaaaaaaaaaaaaaaaaaa

SEQ ID NO: 253 - DNA, 1644 bp, Homo sapiens
tggacggctgcttcccaccagcaaagaccacgactggagagccgagccggaggcagctgggaaacatgaagagcgtcttgctgctgaccacgctcctcgtgcctgcacacctggtggccgcctggagcaataattatgcggtggactgccctcaacactgtgacagcagtgagtgcaaaagcagcccgcgctgcaagaggacagtgctcgacgactgtggctgctgccgagtgtgcgctgcagggcggggagaaacttgctaccgcacagtctcaggcatggatggcatgaagtgtggcccggggctgaggtgtcagccttctaatggggaggatccttttggtgaagagtttggtatctgcaaagactgtccctacggcaccttcgggatggattgcagagagacctgcaactgccagtcaggcatctgtgacagggggacgggaaaatgcctgaaattccccttcttccaatattcagtaaccaagtcttccaacagatttgtttctctcacggagcatgacatggcatctggagatggcaatattgtgagagaagaagttgtgaaagagaatgctgccgggtctcccgtaatgaggaaatggttaaatccacgctgatcccggctgtgatttctgagagaaggctctattttcgtgattgttcaacacacagccaacattttaggaactttctagattatagcataaggacatgtaatttttgaagaccaaatgtgatgcatggtggatccagaaaacaaaaagtaggatacttacaatccataacatccatatgactgaacacttgtatgtgtttgttaaatattcgaatgcatgtagatttgttaaatgtgtgtgtatagtaacactgaagaactaaaaatgcaatttaggtaatcttacatggagacaggtcaaccaaagagggagctaggcaaagctgaagaccgcagtgagtcaaattagttctttgactttgatgtacattaatgttgggatatggaatgaagacttaagagcaggagaagatggggagggggtgggagtgggaaataaaatatttagcccttccttggtaggtagcttctctagaatttaattgtgctttttttttttttttggctttgggaaaagtcaaaataaaacaaccagaaaacccctgaaggaagtaagatgtttgaagcttatggaaatttgagtaacaaacagctttgaactgagagcaatttcaaaaggctgctgatgtagttcccgggttacctgtatctgaaggacggttctggggcataggaaacacatacacttccataaatagctttaacgtatgccacctcagagataaatctaagaagtattttacccactggtggtttgtgtgtgtatgaaggtaaatatttatatatttttataaataaatgtgttagtgcaagtcatcttccctacccatatttatcatcctcttgaggaaagaaatctagtattatttgttgaaaatggttagaataaaactatgactctataaggttttcaaacatctgaggcatgataaatttattatccataattatagtaataataaccttaataagcataagaaaaacagagtcactctggatttcaaaaatgtcaaaaaaaaaaaaaa

SEQ ID NO: 254 - DNA, 817 bp, Homo sapiens
agtcctgcgtccgggccccgaggcgcagcagggcaccaggtggagcaccagctacgcgtggcgcagcgcagcgtccctagcaccgagcctcccgcagccgccgagatgctgcgaacagagagctgccgccccaggtcgcccgccggacaggtggccgcggcgtccccgctcctgctgctgctgctgctgctcgcctggtgcgcgggcgcctgccgaggtgctccaatattacctcaaggattacagcctgaacaacagctacagttgtggaatgagatagatgatacttgttcgtcttttctgtccattgattctcagcctcaggcatccaacgcactggaggagctttgctttatgattatgggaatgctaccaaagcctcaggaacaagatgaaaaagataatactaaaaggttcttatttcattattcgaagacacagaagttgggcaagtcaaatgttgtgtcgtcagttgtgcatccgttgctgcagctcgttcctcacctgcatgagagaagaatgaagagattcagagtggacgaagaattccaaagtccctttgcaagtcaaagtcgaggatattttttattcaggccacggaatggaagaaggtcagcagggttcatttaaaatggatgccagctaattttccacagagcaatgctatggaatacaaaatgtactgacattttgttttcttctgaaaaaaatccttgctaaatgtactctgttgaaaatccctgtgttgtcaatgttctcagttgtaacaatgttgtaaatgttcaatttgttgaaaattaaaaaatctaaaaataaa

SEQ ID NO: 255 - DNA, 1079 bp, Homo sapiens
cgggcgggcgggcgaagctgggctcggggccaagcgaggtctagccggagcgactgtgccccgcctcctgggcggagcgggcggctccccatggtcagagcctcgtgccggctcggcagcgcccggacgccgagcccagcgcgtcggccccccggcgtgcgggcgtctcagagccgcggaggggccgccgggaccgtttcagcgtggcggcgctggtgctggcgttggccctggaggacggccccgagtgatggctggcgcctgcctcccgggtgtctcccgggtacagatggagtcgtcccgcggccgccggcggcaaggtcggcagctgcgaggccaagagagaccccaggacacacacagctgcctcccggtgcgagaagaagaccccggcttgagagtgagatggcgtttaatgattgcttcagtttgaactaccctggcaacccctgcccaggggacttgatcgaagtgttccgtcctggctatcagcactgggccctgtacttgggtgatggttacgttatcaacatagcacctgtagatggcattcctgcgtcctttacaagcgccaagtctgtattcagcagtaaggccctggtgaaaatgcagctcttgaaggatgttgtgggaaatgacacatacagaataaacaataaatacgatgaaacgtacccccctctccctgtggaagaaatcataaagcggtcagagtttgtaattggacaggaggtggcctataacttacttgtcaacaactgtgaacattttgtgacattgcttcgctatggagaaggagtttcagagcaggccaaccgagcgataagtaccgttgagtttgtgacagctgctgttggtgtcttctcattcctgggcttgtttccaaaaggacaaagagcaaaatactattaacaatttaccaaagagatattgatattgaaggaatttgggaggaggaaaagaaacctggggtgaatacttattttcagtgcatcattactgttccagattcctatgatggatggcagactctttaataaattgcttactgatattatcttaaaaaaaaaaaaaaaaaa

SEQ ID NO: 256 - DNA, 1410 bp, Homo sapiens
acccccgagcccccgcagccctagagccgcccaagggatggcgatggcgtacttggcttggagactggcgcggcgttcgtgtccgaggtcactagtttcccggtagttcagctgcacatgaatagaacagcaatgagagccagtcagaaggactttgaaaattcaatgaatcaagtgaaactcttgaaaaaggatccaggaaacgaagtgaagctaaaactctacgcgctatataagcaggccactgaaggaccttgtaacatgcccaaaccaggtgtatttgacttgatcaacaaggccaaatgggacgcatggaatgcccttggcagcctgcccaaggaagctgccaggcagaactatgtggatttggtgtccagtttgagtccttcattggaatcctctagtcaggtggagcctggaacagacaggaaatcaactgggtttgaaactctggtggtgacctccgaagatggcatcacaaagatcatgttcaaccggcccaaaaagaaaaatgccataaacactgagatgtatcatgaaattatgcgtgcacttaaagctgccagcaaggatgactcaatcatcactgttttaacaggaaatggtgactattacagtagtgggaatgatctgactaacttcactgatattccccctggtggagtagaggagaaagctaaaaataatgccgttttactgagggaatttgtgggctgttttatagattttcctaagcctctgattgcagtggtcaatggtccagctgtgggcatctccgtcaccctccttgggctattcgatgccgtgtatgcatctgacagggcaacatttcatacaccatttagtcacctaggccaaagtccggaaggatgctcctcttacacttttccgaagataatgagcccagccaaggcaacagagatgcttatttttggaaagaagttaacagcgggagaggcatgtgctcaaggacttgttactgaagttttccctgatagcacttttcagaaagaagtctggaccaggctgaaggcatttgcaaagcttcccccaaatgccttgagaatttcaaaagaggtaatcaggaaaagagagagagaaaaactacacgctgttaatgctgaagaatgcaatgtccttcagggaagatggctatcagatgaatgcacaaatgctgtggtgaacttcttatccagaaaatcaaaactgtgatgaccactacagcagagtaaagcatgtccaaggaaggatgtgctgttacctctgatttccagtactggaactaaataagcttcattgtgccttttgtagtgctagaatatcaattacaatgatgatatttcactacagctctgatgaataaaaagttttgtaaaacaagcttaagaattcaaaaaaaaaaaaaaaaaa

SEQ ID NO: 257 - DNA, 1481 bp, Homo sapiens
acccccgagcccccgcagccctagagccgcccaagggatggcgatggcgtacttggcttggagactggcgcggcgttcgtgtccgaggtcactagtttcccggtagttcagctgcacatgaatagaacagcaatgagagccagtcagaaggactttgaaaattcaatgaatcaagtgaaactcttgaaaaaggatccaggaaacgaagtgaagctaaaactctacgcgctatataagcaggccactgaaggaccttgtaacatgcccaaaccaggtgtatttgacttgatcaacaaggccaaatgggacgcatggaatgcccttggcagcctgcccaaggaagctgccaggcagaactatgtggatttggtgtccagtttgagtccttcattggaatcctctagtcaggtggagcctggaacagacaggaaatcaactgggtttgaaactctggtggtgacctccgaagatggcatcacaaagatcatgttcaaccggcccaaaaagaaaaatgccataaacactgaggaaggttggtaattgtggctacttcatacaacagagttgagcattcattgtttagagtttgtgaatttcagatgtatcatgaaattatgcgtgcacttaaagctgccagcaaggatgactcaatcatcactgttttaacaggaaatggtgactattacagtagtgggaatgatctgactaacttcactgatattccccctggtggagtagaggagaaagctaaaaataatgccgttttactgagggaatttgtgggctgttttatagattttcctaagcctctgattgcagtggtcaatggtccagctgtgggcatctccgtcaccctccttgggctattcgatgccgtgtatgcatctgacagggcaacatttcatacaccatttagtcacctaggccaaagtccggaaggatgctcctcttacacttttccgaagataatgagcccagccaaggcaacagagatgcttatttttggaaagaagttaacagcgggagaggcatgtgctcaaggacttgttactgaagttttccctgatagcacttttcagaaagaagtctggaccaggctgaaggcatttgcaaagcttcccccaaatgccttgagaatttcaaaagaggtaatcaggaaaagagagagagaaaaactacacgctgttaatgctgaagaatgcaatgtccttcagggaagatggctatcagatgaatgcacaaatgctgtggtgaacttcttatccagaaaatcaaaactgtgatgaccactacagcagagtaaagcatgtccaaggaaggatgtgctgttacctctgatttccagtactggaactaaataagcttcattgtgccttttgtagtgctagaatatcaattacaatgatgatatttcactacagctctgatgaataaaaagttttgtaaaacaagcttaagaattcaaaaaaaaaaaaaaaaaa

SEQ ID NO: 258 - DNA, 5772 bp, Homo sapiens
gtcagagtttcctgcccaccatctttgtccctggcaaagtgggttttgcgcagtggcttagacctagaaaagaatcgtgacgggcaggaaaccattacaccaccacctgggctgtgctctccggctcccgccgccacccccgccctcgccttcgcctccgcctccggtgcacattaaagatccaaagtcatgactgactccaagtatttcacaaccaataaaaaaggagaaatatttgaactaaaagctgaactcaacaatgaaaagaaagaaaagagaaaggaggctgtgaagaaagtgattgctgctatgaccgtggggaaggatgttagttctctctttccagacgtagtgaactgtatgcagactgacaatctggaactaaagaagcttgtgtatctctacttgatgaactacgccaagagtcagccagacatggccatcatggctgtaaacagctttgtgaaggactgtgaagatcctaatcctttgattcgagccttggcagtcagaaccatggggtgcatccgggtagacaaaattacagaatatctctgtgagccgctccgcaagtgcttgaaggatgaggatccctatgttcggaaaacagcagcagtctgcgtggcaaaactccatgatatcaatgcccaaatggtggaagatcagggatttctggattctctacgggatctcatagcagattcaaatccaatggtggtggctaatgccgtagcggcattatctgaaatcagtgagtctcacccaaacagcaacttacttgatctgaacccacagaacattaataagctgctgacagccctgaatgaatgcactgaatggggccagattttcatcctggactgcctgtctaattacaaccctaaagatgatcgggaggctcagagcatctgtgagcgggtaactccccggctatcccatgccaactcagcagtggtgctttcagcggtaaaagtcctaatgaagtttctagaattgttacctaaggattctgactactacaatatgctgctgaagaagttagcccctccacttgtcactttgctgtctggggagccagaagtgcagtatgtcgccctgaggaacatcaacttaattgtccagaaaaggcctgaaatcttgaagcaggaaatcaaagtcttctttgtgaagtacaatgatcccatctatgttaaactagagaagttggacatcatgattcgtttggcatctcaagccaacattgctcaggttctggcagaactgaaagaatatgctacagaggtggatgttgactttgttcgaaaagctgtgcgggccattggacggtgtgccatcaaggtggagcaatctgcagagcgctgtgtaagcacattgcttgatctaatccagaccaaagtgaattatgtggtccaagaagcaattgttgtcatcagggacatcttccgcaaataccccaacaagtatgaaagtatcatcgccactctgtgtgagaacttagactcgctggatgagccagatgctcgagcagctatgatttggattgtgggagaatatgctgaaagaattgacaatgcagatgagttactagaaagcttcctggagggttttcacgatgaaagcacccaggtgcagctcactctgcttactgccatagtgaagctgtttctcaagaaaccatcagaaacacaggagctagtccagcaggtcttgagtttggcaacacaggattctgataatcctgaccttcgagaccggggctatatttattggcgccttctctcaactgaccctgttacagctaaagaagtagtcttgtctgagaagccactgatctctgaggagacggaccttattgagccaactctgctggatgagctaatctgccacattggttctttggcctctgtgtatcataagcctcccaatgcttttgtggaaggaagtcatggaattcatcgtaaacacttgccaattcatcatgggagcactgatgcaggtgacagccctgttggcactaccactgcaacgaacctggaacagcctcaggttatcccctctcaaggtgatcttctaggggatcttttaaaccttgacctcggtcccccagtcaatgtgccacaggtgtcctccatgcagatgggagcagtggatctcctaggaggaggactagatagtctgcttggcagtgaccttggcgggggcattggaggaagtccggcagtgggacaatccttcatcccatcatcggtgcctgcaacctttgctccttcacctacacctgctgtggtcagcagtggactgaatgacctgtttgaactctccacagggataggcatggcacctggtggatatgtggctcctaaggctgtctggctacctgcagtaaaggctaaaggcttggagatttccggaacatttactcaccgccaagggcacatctatatggaaatgaacttcaccaataaagctctgcagcacatgacagattttgcaatccagtttaacaaaaatagctttggtgtcatccccagcactcctctggccatccatacaccactgatgccaaaccagagcattgatgtctccctgcctctcaataccttgggcccagtcatgaagatggaacctctgaataacctccaggtggctgtgaaaaacaatatcgatgtcttctacttcagctgcctcatcccactcaatgtgctttttgtagaagatggcaaaatggagcgccaggtcttccttgcaacatggaaggatattcccaatgaaaatgaacttcagtttcagattaaggaatgtcatttaaatgctgacactgtttccagcaagttgcaaaacaacaatgtttatactattgccaagaggaatgtggaagggcaggacatgctgtaccaatccctgaagctcactaatggcatttggattttggccgaactacgtatccagccaggaaaccccaattacacgctgtcactgaagtgtagagctcctgaagtctctcaatacatctatcaggtctacgacagcattttgaaaaactaacaagactggtccagtacccttcaaccatgctgtgatcggtgcaagtcaagaactcttaactggaagaaattgtattgctgcgtagaatctgaacacactgaggccacctagcaaggtagtaactagtctaacctgtgctaacattagggcacaacctgttggatagttttagcttcctgtgaacatttgtaaccactgcttcagtcacctcccacctcttgccacctgctgctgctatctgtccttacttgtgggcttctccatgctgtgccaatggctggctttttctacaccctcttttgagtgtagtttggtattttgtaattgagagctcatttcaaaagcagaaaaagacaacaaatattaaagcaaggaaaagtgtaactgaaacactgcactttactgttttatacttttgtacatatgagaaatcaagggattagtgcaaccagtagaaagcattgaaatgactgtcattaaccacacagtcctggaggcagagatgcagttacctaccctagcttttgatgggttctcttacctgtagtagccttatccctggtcatttggattttcagtttgcttttttctttttttcccctccaaactccttttccttggccaagccttcatgcttccccctttccatattataatctcatttgattgctctgcagttgggaacggtgatcttcttgaatgatgtttcagtgtgcaaaaactatagagcctgtcagcaccaaagctgacagaagttataccttactcctttcctttcccctgaacaaacctgctaatcccactaattcaggaatttgagtagagatggggaacaagaacccagatgctgtcccctcaccccctctcctgtatttctcaggtccagttcaaatctaaaattctacttttagagttgaaacagagtaataacttatctaaccctcttttcctacaaaggagaaagataaaaggcacaaaggttaccgccaaggcccgtcagctgtgtagtggcaaagccgagaccgagtctcctaagtccccgtcagtgtggttttcaccacaggactgtctcttgtcgttttcccctaatgccttctcctgccttttctgtgcctagtttttggctcttcacatattccatattgattttgacgctctgtatattggcatcaggtggcagctgaatatcttttgaattactcgaaggtaaagccagatgccagaatgaaggtgtagccagtgtttcccatatgcccctggagccccacttattgaggccagcagaataggtgcagagatgaagtgagcttagagatgttgcaaatgctctttatcccttcagctctctgatctgctctttcttcatgatacttagtctgcagggcatattaagatcatcccagaggttcaggcagttcctgtcatctctgaaaagactgggggatatgaaatcttccccctaccccacttaatgcgttggatatgatttttcaaagaatgcttcatgcccaaaataccagcctgtttagcagtgttacactgtttgatctgcgggcacttgttgcattgcctggcacccaatattcagggtccatgactaagactggtcttctcagatgccctgcttaaatcaggggcacttcaggctccacaggcgtcatgttggactgagacctaactcactggactcagaggaggaatcgtggaaaacaagagcaaaactaccccacacccctatttcatgtctgaaataaccctgtttcataccagttgcaaagcttgtggggagcggtcccacaaagcactttcttaaaccttgagaatctccaagagaaaaatatttggggaaggagggaggaaatatgtcccttgcacaccacccctgaagcacatggcagtaggaaacagcataggattgtatgtgggaggtggataggtcggtgatgtgtggagcggaaaagcaggttggtaaagttcccttcttgggacttattcctggagtcagtggatacaagtagtgcagaaggttcacactgcaaatagtgttctcatctcaaagcaaactatcattccagaaggaaaagtgtgtcagggcaagcagacaacacaatttcctatcagaatatgtccctcaacccccgaaacaaggcttctctcagcctccccaccagtgatggataacagctcctattctcagctgacctgactgagccaacccatgaactcttcactccttggggaagccacctcccatcacacccctgagcagagttagggaggaattctacttcccataaaaggacctctcctgagaggcaaaacctgttgcctccaccacggcttccctcttggctcattccaagcttggccaaattggggaagtgggatggaggttgccctgcatcccccctcctctgcctgagtgtgtctttgtaatgtcagctggcatcatacaaagagcaggagaagcaaacacccagaactcttttgctggtcagagattccctgagtgtctgtcctcacccaagcctgctctgtgtctgtgttgtgaagcttgagactctggaaagaaatggggagggggggcaggggaaatgttgccctaagaatgcttctcattcctctgttcttattgggtcctgtttttcgggagggtgggggttgggggaagcttgaccttgtgtcttcgtcaataaactcacatttacacaaaatgaaaaaaaaaaa

SEQ ID NO: 259 - DNA, 5730 bp, Homo sapiens
gtcagagtttcctgcccaccatctttgtccctggcaaagtgggttttgcgcagtggcttagacctagaaaagaatcgtgacgggcaggaaaccattacaccaccacctgggctgtgctctccggctcccgccgccacccccgccctcgccttcgcctccgcctccggtgcacattaaagatccaaagtcatgactgactccaagtatttcacaaccaataaaaaaggagaaatatttgaactaaaagctgaactcaacaatgaaaagaaagaaaagagaaaggaggctgtgaagaaagtgattgctgctatgaccgtggggaaggatgttagttctctctttccagacgtagtgaactgtatgcagactgacaatctggaactaaagaagcttgtgtatctctacttgatgaactacgccaagagtcagccagacatggccatcatggctgtaaacagctttgtgaaggactgtgaagatcctaatcctttgattcgagccttggcagtcagaaccatggggtgcatccgggtagacaaaattacagaatatctctgtgagccgctccgcaagtgcttgaaggatgaggatccctatgttcggaaaacagcagcagtctgcgtggcaaaactccatgatatcaatgcccaaatggtggaagatcagggatttctggattctctacgggatctcatagcagattcaaatccaatggtggtggctaatgccgtagcggcattatctgaaatcagtgagtctcacccaaacagcaacttacttgatctgaacccacagaacattaataagctgctgacagccctgaatgaatgcactgaatggggccagattttcatcctggactgcctgtctaattacaaccctaaagatgatcgggaggctcagagcatctgtgagcgggtaactccccggctatcccatgccaactcagcagtggtgctttcagcggtaaaagtcctaatgaagtttctagaattgttacctaaggattctgactactacaatatgctgctgaagaagttagcccctccacttgtcactttgctgtctggggagccagaagtgcagtatgtcgccctgaggaacatcaacttaattgtccagaaaaggcctgaaatcttgaagcaggaaatcaaagtcttctttgtgaagtacaatgatcccatctatgttaaactagagaagttggacatcatgattcgtttggcatctcaagccaacattgctcaggttctggcagaactgaaagaatatgctacagaggtggatgttgactttgttcgaaaagctgtgcgggccattggacggtgtgccatcaaggtggagcaatctgcagagcgctgtgtaagcacattgcttgatctaatccagaccaaagtgaattatgtggtccaagaagcaattgttgtcatcagggacatcttccgcaaataccccaacaagtatgaaagtatcatcgccactctgtgtgagaacttagactcgctggatgagccagatgctcgagcagctatgatttggattgtgggagaatatgctgaaagaattgacaatgcagatgagttactagaaagcttcctggagggttttcacgatgaaagcacccaggtgcagctcactctgcttactgccatagtgaagctgtttctcaagaaaccatcagaaacacaggagctagtccagcaggtcttgagtttggcaacacaggattctgataatcctgaccttcgagaccggggctatatttattggcgccttctctcaactgaccctgttacagctaaagaagtagtcttgtctgagaagccactgatctctgaggagacggaccttattgagccaactctgctggatgagctaatctgccacattggttctttggcctctgtgtatcataagcctcccaatgcttttgtggaaggaagtcatggaattcatcgtaaacacttgccaattcatcatgggagcactgatgcaggtgacagccctgttggcactaccactgcaacgaacctggaacagcctcaggttatcccctctcaaggtgatcttctaggggatcttttaaaccttgacctcggtcccccagtcaatgtgccacaggtgtcctccatgcagatgggagcagtggatctcctaggaggaggactagatagtctggtgggacaatccttcatcccatcatcggtgcctgcaacctttgctccttcacctacacctgctgtggtcagcagtggactgaatgacctgtttgaactctccacagggataggcatggcacctggtggatatgtggctcctaaggctgtctggctacctgcagtaaaggctaaaggcttggagatttccggaacatttactcaccgccaagggcacatctatatggaaatgaacttcaccaataaagctctgcagcacatgacagattttgcaatccagtttaacaaaaatagctttggtgtcatccccagcactcctctggccatccatacaccactgatgccaaaccagagcattgatgtctccctgcctctcaataccttgggcccagtcatgaagatggaacctctgaataacctccaggtggctgtgaaaaacaatatcgatgtcttctacttcagctgcctcatcccactcaatgtgctttttgtagaagatggcaaaatggagcgccaggtcttccttgcaacatggaaggatattcccaatgaaaatgaacttcagtttcagattaaggaatgtcatttaaatgctgacactgtttccagcaagttgcaaaacaacaatgtttatactattgccaagaggaatgtggaagggcaggacatgctgtaccaatccctgaagctcactaatggcatttggattttggccgaactacgtatccagccaggaaaccccaattacacgctgtcactgaagtgtagagctcctgaagtctctcaatacatctatcaggtctacgacagcattttgaaaaactaacaagactggtccagtacccttcaaccatgctgtgatcggtgcaagtcaagaactcttaactggaagaaattgtattgctgcgtagaatctgaacacactgaggccacctagcaaggtagtaactagtctaacctgtgctaacattagggcacaacctgttggatagttttagcttcctgtgaacatttgtaaccactgcttcagtcacctcccacctcttgccacctgctgctgctatctgtccttacttgtgggcttctccatgctgtgccaatggctggctttttctacaccctcttttgagtgtagtttggtattttgtaattgagagctcatttcaaaagcagaaaaagacaacaaatattaaagcaaggaaaagtgtaactgaaacactgcactttactgttttatacttttgtacatatgagaaatcaagggattagtgcaaccagtagaaagcattgaaatgactgtcattaaccacacagtcctggaggcagagatgcagttacctaccctagcttttgatgggttctcttacctgtagtagccttatccctggtcatttggattttcagtttgcttttttctttttttcccctccaaactccttttccttggccaagccttcatgcttccccctttccatattataatctcatttgattgctctgcagttgggaacggtgatcttcttgaatgatgtttcagtgtgcaaaaactatagagcctgtcagcaccaaagctgacagaagttataccttactcctttcctttcccctgaacaaacctgctaatcccactaattcaggaatttgagtagagatggggaacaagaacccagatgctgtcccctcaccccctctcctgtatttctcaggtccagttcaaatctaaaattctacttttagagttgaaacagagtaataacttatctaaccctcttttcctacaaaggagaaagataaaaggcacaaaggttaccgccaaggcccgtcagctgtgtagtggcaaagccgagaccgagtctcctaagtccccgtcagtgtggttttcaccacaggactgtctcttgtcgttttcccctaatgccttctcctgccttttctgtgcctagtttttggctcttcacatattccatattgattttgacgctctgtatattggcatcaggtggcagctgaatatcttttgaattactcgaaggtaaagccagatgccagaatgaaggtgtagccagtgtttcccatatgcccctggagccccacttattgaggccagcagaataggtgcagagatgaagtgagcttagagatgttgcaaatgctctttatcccttcagctctctgatctgctctttcttcatgatacttagtctgcagggcatattaagatcatcccagaggttcaggcagttcctgtcatctctgaaaagactgggggatatgaaatcttccccctaccccacttaatgcgttggatatgatttttcaaagaatgcttcatgcccaaaataccagcctgtttagcagtgttacactgtttgatctgcgggcacttgttgcattgcctggcacccaatattcagggtccatgactaagactggtcttctcagatgccctgcttaaatcaggggcacttcaggctccacaggcgtcatgttggactgagacctaactcactggactcagaggaggaatcgtggaaaacaagagcaaaactaccccacacccctatttcatgtctgaaataaccctgtttcataccagttgcaaagcttgtggggagcggtcccacaaagcactttcttaaaccttgagaatctccaagagaaaaatatttggggaaggagggaggaaatatgtcccttgcacaccacccctgaagcacatggcagtaggaaacagcataggattgtatgtgggaggtggataggtcggtgatgtgtggagcggaaaagcaggttggtaaagttcccttcttgggacttattcctggagtcagtggatacaagtagtgcagaaggttcacactgcaaatagtgttctcatctcaaagcaaactatcattccagaaggaaaagtgtgtcagggcaagcagacaacacaatttcctatcagaatatgtccctcaacccccgaaacaaggcttctctcagcctccccaccagtgatggataacagctcctattctcagctgacctgactgagccaacccatgaactcttcactccttggggaagccacctcccatcacacccctgagcagagttagggaggaattctacttcccataaaaggacctctcctgagaggcaaaacctgttgcctccaccacggcttccctcttggctcattccaagcttggccaaattggggaagtgggatggaggttgccctgcatcccccctcctctgcctgagtgtgtctttgtaatgtcagctggcatcatacaaagagcaggagaagcaaacacccagaactcttttgctggtcagagattccctgagtgtctgtcctcacccaagcctgctctgtgtctgtgttgtgaagcttgagactctggaaagaaatggggagggggggcaggggaaatgttgccctaagaatgcttctcattcctctgttcttattgggtcctgtttttcgggagggtgggggttgggggaagcttgaccttgtgtcttcgtcaataaactcacatttacacaaaatgaaaaaaaaaaa

SEQ ID NO: 260 - DNA, 3024 bp, Homo sapiens
attcacatcctgtgtaatcataaatactgctctaagaaagggacaggaagtctcagaggctggagagcagagcaccaagatcgttctggcaggaacagccagtgggaggttccagctgagcgctccccagaggtgagctgatccccagccacagcacacaggaccaggctgcgagaacagcatcatcagcatcatgctattacaatcccaaaccatgggggtttctcacagctttacaccaaagggcatcactatccctcaaagagagaaacctggacacatgtaccaaaacgaagattacctgcagaacgggctgccaacagaaaccaccgttcttgggactgtccagatcctgtgttgcctgttgatttcaagtctgggggccatcttggtttttgctccctacccctcccacttcaatccagcaatttccaccactttgatgtctgggtacccatttttaggagctctgtgttttggcattactggatccctctcaattatctctggaaaacaatcaactaagccctttgacctgagcagcttgacctcaaatgcagtgagttctgttactgcaggagcaggcctcttcctccttgctgacagcatggtagccctgaggactgcctctcaacattgtggctcagaaatggattatctatcctcattgccttattcggagtactattatccaatatatgaaatcaaagattgtctcctgaccagtgtcagtttaacaggtgtcctagtggtgatgctcatcttcactgtgctggagctcttattagctgcatacagttctgtcttttggtggaaacagctctactccaacaaccctgggagttcattttcctcgacccagtcacaagatcatatccaacaggtcaaaaagagttcttcacggtcttggatataagtaactcttggcctcagaggaaggaaaagcaactcaacactcatggtcaagtgtgattagactttcctgaaatctctgccattttagatactgtgaaacaaactaaaaaaaaaaaagcttttgttttgtatttgtttactatgagtcgttatttaatttctcttgaaaataatttcctcaaagcccaagtcaataaatgttatcagccagtcttccaaaatggtcataaactttataaactgctttgggtaaactgagcagaaggtgatacacagaagggaaaatgtgcactcatgctagtgtgaatttggtaagttgcgtgactctgcaggctgtttctgtattattttcacactcatattgcttaaatattacatattagggattgtaagaaaactttaattaaaaattaaagactatatataattaaactactctgccctggacactctctgagaaacagatctactgggccctttttcatgagccattaggtggaagacagcaaagagatcttctcaagtgcttaggattacctctcaacacacagcaagcatgtccctgcctcccatgaatcttaccatgtaaatccaaatctctgcaatcctgtggcaccaaccagtggtgctcattctattgtttaaaaatggccttcttggctgggcgcggtggctcactcctgtaatcccagcactttggtaggccgaggtggacggatcacccgaggtcaggagtttgagaccagcctggccaacaaggtgaaaccctgtctctactaaaaatacaaaaaattagccaggcatggtggtgcgcacctgtagttccagctacttgggaggctgaggcagaagaatcacttgaacccgggaaggggaggttgcagtgagcggagactgcaccactgcattccagcccggcctacaagaacaaaactccatctcaaaataaataaaaaaataaataaaaataaaaatagactatatatagtctttgaattcatttattttaaataaatgaataaaataaaataaaaaagaatattcagtcgttggcacataaactatgttctcttctgtcatttcagggtaggagtcaatgaagacatcttagtcttaacaagttacagataatctctgactggcatgttttctgcttctagcttggagctaaatgctgctcatgctgaaaagaataatgtctatttctttgtttgggtattagctctattttgatctatagcacagttttgtaattcagatcatcacccctgcactttgtaccacatgggcgtattctttcttcccagtcattgctgcaattatcttgtctgttctttgtgtaatatgttctgtgtgagcctctgcattaaactcgatttcttgggcaattatggaaattccagtgtggctgcagtttaactttgcactctctatgcatatgaggtttcctaaataaatgaggagtagcatagtttaaaatatatatatcttataactttctacaacaaagaattattgagtccaaatgtcatcagtgctcattttgagataccctgctatcgatggtcgctacaaaccaggaaatactcaagttattatgtgtatacattggttttagttttatgaaacaatttaccttcatgatctcatagttaaaattgtaataaatttaggaatataaaggatcaatatgggaagcaaaatttctaaaggcagtttctgttgttttaattagtatttgtgtagttcaaaccaggaaggatttgactatcattagattttgcttaactttatgaaagctaaaatattctctgttataaaggggcaactccatctggtcctatagcatctttactactgatttttttttgtttaatttgaaaatgcaaagaattgttaaatgttcttaaatgttctcactacaaaaaaagaaaaaagataactacgtgaggtgatggatatgttaattagctggattgtggtaatcattttggaatgtatatgtatatcaaaacatgtagtacaccctaaatatatataatttttatttgtcaaatatacctcaataaagatggaaaaaaatcgaaattcaaaaaaaaaaaaaaaaaa

SEQ ID NO: 261 - DNA, 2889 bp, Homo sapiens
attcacatcctgtgtaatcataaatactgctctaagaaagggacaggaagtctcagaggctggagagcagagcaccaagatcgttctggcaggaacagccagtgggaggttccagctgagcgctccccagaggtgagctgatccccagccacagcacacaggaccaggctgcgagaacagcatcatcagcatcatgctattacaatcccaaaccatgggggtttctcacagctttacaccaaagggcatcactatccctcaaagagagaaacctggacacatgtaccaaaacgaagattacctgcagaacgggctgccaacagaaaccaccgttcttgggtttggcattactggatccctctcaattatctctggaaaacaatcaactaagccctttgacctgagcagcttgacctcaaatgcagtgagttctgttactgcaggagcaggcctcttcctccttgctgacagcatggtagccctgaggactgcctctcaacattgtggctcagaaatggattatctatcctcattgccttattcggagtactattatccaatatatgaaatcaaagattgtctcctgaccagtgtcagtttaacaggtgtcctagtggtgatgctcatcttcactgtgctggagctcttattagctgcatacagttctgtcttttggtggaaacagctctactccaacaaccctgggagttcattttcctcgacccagtcacaagatcatatccaacaggtcaaaaagagttcttcacggtcttggatataagtaactcttggcctcagaggaaggaaaagcaactcaacactcatggtcaagtgtgattagactttcctgaaatctctgccattttagatactgtgaaacaaactaaaaaaaaaaaagcttttgttttgtatttgtttactatgagtcgttatttaatttctcttgaaaataatttcctcaaagcccaagtcaataaatgttatcagccagtcttccaaaatggtcataaactttataaactgctttgggtaaactgagcagaaggtgatacacagaagggaaaatgtgcactcatgctagtgtgaatttggtaagttgcgtgactctgcaggctgtttctgtattattttcacactcatattgcttaaatattacatattagggattgtaagaaaactttaattaaaaattaaagactatatataattaaactactctgccctggacactctctgagaaacagatctactgggccctttttcatgagccattaggtggaagacagcaaagagatcttctcaagtgcttaggattacctctcaacacacagcaagcatgtccctgcctcccatgaatcttaccatgtaaatccaaatctctgcaatcctgtggcaccaaccagtggtgctcattctattgtttaaaaatggccttcttggctgggcgcggtggctcactcctgtaatcccagcactttggtaggccgaggtggacggatcacccgaggtcaggagtttgagaccagcctggccaacaaggtgaaaccctgtctctactaaaaatacaaaaaattagccaggcatggtggtgcgcacctgtagttccagctacttgggaggctgaggcagaagaatcacttgaacccgggaaggggaggttgcagtgagcggagactgcaccactgcattccagcccggcctacaagaacaaaactccatctcaaaataaataaaaaaataaataaaaataaaaatagactatatatagtctttgaattcatttattttaaataaatgaataaaataaaataaaaaagaatattcagtcgttggcacataaactatgttctcttctgtcatttcagggtaggagtcaatgaagacatcttagtcttaacaagttacagataatctctgactggcatgttttctgcttctagcttggagctaaatgctgctcatgctgaaaagaataatgtctatttctttgtttgggtattagctctattttgatctatagcacagttttgtaattcagatcatcacccctgcactttgtaccacatgggcgtattctttcttcccagtcattgctgcaattatcttgtctgttctttgtgtaatatgttctgtgtgagcctctgcattaaactcgatttcttgggcaattatggaaattccagtgtggctgcagtttaactttgcactctctatgcatatgaggtttcctaaataaatgaggagtagcatagtttaaaatatatatatcttataactttctacaacaaagaattattgagtccaaatgtcatcagtgctcattttgagataccctgctatcgatggtcgctacaaaccaggaaatactcaagttattatgtgtatacattggttttagttttatgaaacaatttaccttcatgatctcatagttaaaattgtaataaatttaggaatataaaggatcaatatgggaagcaaaatttctaaaggcagtttctgttgttttaattagtatttgtgtagttcaaaccaggaaggatttgactatcattagattttgcttaactttatgaaagctaaaatattctctgttataaaggggcaactccatctggtcctatagcatctttactactgatttttttttgtttaatttgaaaatgcaaagaattgttaaatgttcttaaatgttctcactacaaaaaaagaaaaaagataactacgtgaggtgatggatatgttaattagctggattgtggtaatcattttggaatgtatatgtatatcaaaacatgtagtacaccctaaatatatataatttttatttgtcaaatatacctcaataaagatggaaaaaaatcgaaattcaaaaaaaaaaaaaaaaaa

SEQ ID NO: 262 - DNA, 2976 bp, Homo sapiens
attcacatcctgtgtaatcataaatactgctctaagaaagggacaggaagtctcagaggctggagagcagagcaccaagatcgttctggcaggaacagccagtgggaggttccagctgagcgctccccagagcatcatcagcatcatgctattacaatcccaaaccatgggggtttctcacagctttacaccaaagggcatcactatccctcaaagagagaaacctggacacatgtaccaaaacgaagattacctgcagaacgggctgccaacagaaaccaccgttcttgggactgtccagatcctgtgttgcctgttgatttcaagtctgggggccatcttggtttttgctccctacccctcccacttcaatccagcaatttccaccactttgatgtctgggtacccatttttaggagctctgtgttttggcattactggatccctctcaattatctctggaaaacaatcaactaagccctttgacctgagcagcttgacctcaaatgcagtgagttctgttactgcaggagcaggcctcttcctccttgctgacagcatggtagccctgaggactgcctctcaacattgtggctcagaaatggattatctatcctcattgccttattcggagtactattatccaatatatgaaatcaaagattgtctcctgaccagtgtcagtttaacaggtgtcctagtggtgatgctcatcttcactgtgctggagctcttattagctgcatacagttctgtcttttggtggaaacagctctactccaacaaccctgggagttcattttcctcgacccagtcacaagatcatatccaacaggtcaaaaagagttcttcacggtcttggatataagtaactcttggcctcagaggaaggaaaagcaactcaacactcatggtcaagtgtgattagactttcctgaaatctctgccattttagatactgtgaaacaaactaaaaaaaaaaaagcttttgttttgtatttgtttactatgagtcgttatttaatttctcttgaaaataatttcctcaaagcccaagtcaataaatgttatcagccagtcttccaaaatggtcataaactttataaactgctttgggtaaactgagcagaaggtgatacacagaagggaaaatgtgcactcatgctagtgtgaatttggtaagttgcgtgactctgcaggctgtttctgtattattttcacactcatattgcttaaatattacatattagggattgtaagaaaactttaattaaaaattaaagactatatataattaaactactctgccctggacactctctgagaaacagatctactgggccctttttcatgagccattaggtggaagacagcaaagagatcttctcaagtgcttaggattacctctcaacacacagcaagcatgtccctgcctcccatgaatcttaccatgtaaatccaaatctctgcaatcctgtggcaccaaccagtggtgctcattctattgtttaaaaatggccttcttggctgggcgcggtggctcactcctgtaatcccagcactttggtaggccgaggtggacggatcacccgaggtcaggagtttgagaccagcctggccaacaaggtgaaaccctgtctctactaaaaatacaaaaaattagccaggcatggtggtgcgcacctgtagttccagctacttgggaggctgaggcagaagaatcacttgaacccgggaaggggaggttgcagtgagcggagactgcaccactgcattccagcccggcctacaagaacaaaactccatctcaaaataaataaaaaaataaataaaaataaaaatagactatatatagtctttgaattcatttattttaaataaatgaataaaataaaataaaaaagaatattcagtcgttggcacataaactatgttctcttctgtcatttcagggtaggagtcaatgaagacatcttagtcttaacaagttacagataatctctgactggcatgttttctgcttctagcttggagctaaatgctgctcatgctgaaaagaataatgtctatttctttgtttgggtattagctctattttgatctatagcacagttttgtaattcagatcatcacccctgcactttgtaccacatgggcgtattctttcttcccagtcattgctgcaattatcttgtctgttctttgtgtaatatgttctgtgtgagcctctgcattaaactcgatttcttgggcaattatggaaattccagtgtggctgcagtttaactttgcactctctatgcatatgaggtttcctaaataaatgaggagtagcatagtttaaaatatatatatcttataactttctacaacaaagaattattgagtccaaatgtcatcagtgctcattttgagataccctgctatcgatggtcgctacaaaccaggaaatactcaagttattatgtgtatacattggttttagttttatgaaacaatttaccttcatgatctcatagttaaaattgtaataaatttaggaatataaaggatcaatatgggaagcaaaatttctaaaggcagtttctgttgttttaattagtatttgtgtagttcaaaccaggaaggatttgactatcattagattttgcttaactttatgaaagctaaaatattctctgttataaaggggcaactccatctggtcctatagcatctttactactgatttttttttgtttaatttgaaaatgcaaagaattgttaaatgttcttaaatgttctcactacaaaaaaagaaaaaagataactacgtgaggtgatggatatgttaattagctggattgtggtaatcattttggaatgtatatgtatatcaaaacatgtagtacaccctaaatatatataatttttatttgtcaaatatacctcaataaagatggaaaaaaatcgaaattcaaaaaaaaaaaaaaaaaa

SEQ ID NO: 263 - DNA, 2841 bp, Homo sapiens
attcacatcctgtgtaatcataaatactgctctaagaaagggacaggaagtctcagaggctggagagcagagcaccaagatcgttctggcaggaacagccagtgggaggttccagctgagcgctccccagagcatcatcagcatcatgctattacaatcccaaaccatgggggtttctcacagctttacaccaaagggcatcactatccctcaaagagagaaacctggacacatgtaccaaaacgaagattacctgcagaacgggctgccaacagaaaccaccgttcttgggtttggcattactggatccctctcaattatctctggaaaacaatcaactaagccctttgacctgagcagcttgacctcaaatgcagtgagttctgttactgcaggagcaggcctcttcctccttgctgacagcatggtagccctgaggactgcctctcaacattgtggctcagaaatggattatctatcctcattgccttattcggagtactattatccaatatatgaaatcaaagattgtctcctgaccagtgtcagtttaacaggtgtcctagtggtgatgctcatcttcactgtgctggagctcttattagctgcatacagttctgtcttttggtggaaacagctctactccaacaaccctgggagttcattttcctcgacccagtcacaagatcatatccaacaggtcaaaaagagttcttcacggtcttggatataagtaactcttggcctcagaggaaggaaaagcaactcaacactcatggtcaagtgtgattagactttcctgaaatctctgccattttagatactgtgaaacaaactaaaaaaaaaaaagcttttgttttgtatttgtttactatgagtcgttatttaatttctcttgaaaataatttcctcaaagcccaagtcaataaatgttatcagccagtcttccaaaatggtcataaactttataaactgctttgggtaaactgagcagaaggtgatacacagaagggaaaatgtgcactcatgctagtgtgaatttggtaagttgcgtgactctgcaggctgtttctgtattattttcacactcatattgcttaaatattacatattagggattgtaagaaaactttaattaaaaattaaagactatatataattaaactactctgccctggacactctctgagaaacagatctactgggccctttttcatgagccattaggtggaagacagcaaagagatcttctcaagtgcttaggattacctctcaacacacagcaagcatgtccctgcctcccatgaatcttaccatgtaaatccaaatctctgcaatcctgtggcaccaaccagtggtgctcattctattgtttaaaaatggccttcttggctgggcgcggtggctcactcctgtaatcccagcactttggtaggccgaggtggacggatcacccgaggtcaggagtttgagaccagcctggccaacaaggtgaaaccctgtctctactaaaaatacaaaaaattagccaggcatggtggtgcgcacctgtagttccagctacttgggaggctgaggcagaagaatcacttgaacccgggaaggggaggttgcagtgagcggagactgcaccactgcattccagcccggcctacaagaacaaaactccatctcaaaataaataaaaaaataaataaaaataaaaatagactatatatagtctttgaattcatttattttaaataaatgaataaaataaaataaaaaagaatattcagtcgttggcacataaactatgttctcttctgtcatttcagggtaggagtcaatgaagacatcttagtcttaacaagttacagataatctctgactggcatgttttctgcttctagcttggagctaaatgctgctcatgctgaaaagaataatgtctatttctttgtttgggtattagctctattttgatctatagcacagttttgtaattcagatcatcacccctgcactttgtaccacatgggcgtattctttcttcccagtcattgctgcaattatcttgtctgttctttgtgtaatatgttctgtgtgagcctctgcattaaactcgatttcttgggcaattatggaaattccagtgtggctgcagtttaactttgcactctctatgcatatgaggtttcctaaataaatgaggagtagcatagtttaaaatatatatatcttataactttctacaacaaagaattattgagtccaaatgtcatcagtgctcattttgagataccctgctatcgatggtcgctacaaaccaggaaatactcaagttattatgtgtatacattggttttagttttatgaaacaatttaccttcatgatctcatagttaaaattgtaataaatttaggaatataaaggatcaatatgggaagcaaaatttctaaaggcagtttctgttgttttaattagtatttgtgtagttcaaaccaggaaggatttgactatcattagattttgcttaactttatgaaagctaaaatattctctgttataaaggggcaactccatctggtcctatagcatctttactactgatttttttttgtttaatttgaaaatgcaaagaattgttaaatgttcttaaatgttctcactacaaaaaaagaaaaaagataactacgtgaggtgatggatatgttaattagctggattgtggtaatcattttggaatgtatatgtatatcaaaacatgtagtacaccctaaatatatataatttttatttgtcaaatatacctcaataaagatggaaaaaaatcgaaattcaaaaaaaaaaaaaaaaaa

SEQ ID NO: 264 - DNA, 2574 bp, Homo sapiens
cctgtttagacacatggacaacaatcccagcgctacaaggcacacagtccgcttcttcgtcctcagggttgccagcgcttcctggaagtcctgaagctctcgcagtgcagtgagttcatgcaccttcttgccaagcctcagtctttgggatctggggaggccgcctggttttcctccctccttctgcacgtctgctggggtctcttcctctccaggccttgccgtccccctggcctctcttcccagctcacacatgaagatgcacttgcaaagggctctggtggtcctggccctgctgaactttgccacggtcagcctctctctgtccacttgcaccaccttggacttcggccacatcaagaagaagagggtggaagccattaggggacagatcttgagcaagctcaggctcaccagcccccctgagccaacggtgatgacccacgtcccctatcaggtcctggccctttacaacagcacccgggagctgctggaggagatgcatggggagagggaggaaggctgcacccaggaaaacaccgagtcggaatactatgccaaagaaatccataaattcgacatgatccaggggctggcggagcacaacgaactggctgtctgccctaaaggaattacctccaaggttttccgcttcaatgtgtcctcagtggagaaaaatagaaccaacctattccgagcagaattccgggtcttgcgggtgcccaaccccagctctaagcggaatgagcagaggatcgagctcttccagatccttcggccagatgagcacattgccaaacagcgctatatcggtggcaagaatctgcccacacggggcactgccgagtggctgtcctttgatgtcactgacactgtgcgtgagtggctgttgagaagagagtccaacttaggtctagaaatcagcattcactgtccatgtcacacctttcagcccaatggagatatcctggaaaacattcacgaggtgatggaaatcaaattcaaaggcgtggacaatgaggatgaccatggccgtggagatctggggcgcctcaagaagcagaaggatcaccacaaccctcatctaatcctcatgatgattcccccacaccggctcgacaacccgggccaggggggtcagaggaagaagcgggctttggacaccaattactgcttccgcaacttggaggagaactgctgtgtgcgccccctctacattgacttccgacaggatctgggctggaagtgggtccatgaacctaagggctactatgccaacttctgctcaggcccttgcccatacctccgcagtgcagacacaacccacagcacggtgctgggactgtacaacactctgaaccctgaagcatctgcctcgccttgctgcgtgccccaggacctggagcccctgaccatcctgtactatgttgggaggacccccaaagtggagcagctctccaacatggtggtgaagtcttgtaaatgtagctgagaccccacgtgcgacagagagaggggagagagaaccaccactgcctgactgcccgctcctcgggaaacacacaagcaacaaacctcactgagaggcctggagcccacaaccttcggctccgggcaaatggctgagatggaggtttccttttggaacatttctttcttgctggctctgagaatcacggtggtaaagaaagtgtgggtttggttagaggaaggctgaactcttcagaacacacagactttctgtgacgcagacagaggggatggggatagaggaaagggatggtaagttgagatgttgtgtggcaatgggatttgggctaccctaaagggagaaggaagggcagagaatggctgggtcagggccagactggaagacacttcagatctgaggttggatttgctcattgctgtaccacatctgctctagggaatctggattatgttatacaaggcaagcatttttttttttaaagacaggttacgaagacaaagtcccagaattgtatctcatactgtctgggattaagggcaaatctattacttttgcaaactgtcctctacatcaattaacatcgtgggtcactacagggagaaaatccaggtcatgcagttcctggcccatcaactgtattgggccttttggatatgctgaacgcagaagaaagggtggaaatcaaccctctcctgtctgccctctgggtccctcctctcacctctccctcgatcatatttccccttggacacttggttagacgccttccaggtcaggatgcacatttctggattgtggttccatgcagccttggggcattatgggtcttcccccacttcccctccaagaccctgtgttcatttggtgttcctggaagcaggtgctacaacatgtgaggcattcggggaagctgcacatgtgccacacagtgacttggccccagacgcatagactgaggtataaagacaagtatgaatattactctcaaaatctttgtataaataaatatttttggggcatcctggatgatttcatcttctggaatattgtttctagaacagtaaaagccttattctaaggtg

SEQ ID NO: 265 - DNA, 3224 bp, Homo sapiens
gtcccacatcccgcatccggcatcccagcggccgggcatgtagcagcggcagcaacggcggaatatgggcgggaaccactcccacaagccccccgtgtttgacgagaatgaggaagtcaactttgaccattttcagattctgcgggccattggtaaagggagttttggaaaggtatgcatcgtgcagaagcgagacactaagaaaatgtatgcaatgaagtacatgaacaagcagaagtgcatcgagagggatgaggttcggaatgttttccgggagctgcagatcatgcaagggctggagcaccccttcctggtcaatctgtggtactccttccaggatgaggaggacatgttcatggtggtggacctgctcctgggaggcgacctgcgctaccatctgcagcagaatgtgcatttcacagaggggactgtgaaactctacatctgtgagctggcactggccctggagtatcttcagaggtaccacatcatccacagagacatcaagccagacaatatcctgctggatgaacacggacatgttcacattacagacttcaacatagcgacggtagtgaaaggagcagaaagggcttcctccatggctggcaccaagccctacatggctccagaagtattccaggtgtacatggacagaggccccggatactcgtaccctgtcgactggtggtccctgggcatcacagcctatgagctgctgcggggctggaggccgtacgaaatccactcggtcacgcccatcgatgaaatcctcaacatgttcaaggtggagcgtgtccactactcctccacgtggtgcaaggggatggtggccctgctgaggaagctcctgaccaaggatcctgagagccgcgtgtccagccttcatgacatacagagcgtgccctacttggccgacatgaactgggacgcggtgttcaagaaggcactgatgcccggctttgtgcccaataaagggaggttgaactgcgatcccacatttgagcttgaagagatgattctagaatccaagccacttcacaaaaagaagaagcgattggcaaagaacagatccagggatggcacaaaggacagctgcccgctgaatggacacctgcagcactgtttggagactgtccgggaggaattcatcatattcaacagagagaagctcaggaggcagcagggacagggcagccagctcttggacaccgacagccgagggggaggccaggcccaaagcaagctccaggacgggtgcaacaacaacctcctcacccacacctgcacccgtggctgcagcagctgagcccacacttgttgctgctcaacaggactgcactcgtctctgccctgcccacccagagcccctctttgtgccctgatggtccctgtctcacccctgaaaacatcagatgcagaaaaagccctggacttggagctgggaagcctgggttctggtcccatctccatgactgattcacgtgtgacctcagacaagtcacgccctctctgtgcctccgttttctgcatctgccaaaggggttaaacacttctgccccacttcaaattacaagattatggggagaacccaattaggtaggaaacatgaaaaacctttgatatttataaaatcatttttacgtgcaaaatataaccttaatatttgaagtgacccccattccccaaagcaatcaaaccgtcatgactttgcaatttggcacatcctagcttgttagagggcacttccgaaaaacacagccctgacagcaaaataaaggtctgatatgttggccccttctatggaaacaacgctgccaaatcctggagcaaaacctgaagtgtcttcatgtgcattctctggcaggccacagtcctgagcttgtaagatggtgcagcatgcagaccagacttgtccccaaggtctcagcgctgcggtctcactcctcccctcatttaagaagactatccttaccttttagtttcagcagtcctcaccaccaccatatccccagtgctgggatggcacacaggtgtccattcagatgagagttgggtcgctgagcattggttactcctgcagagtgtaatcagcaccccatccaactggcccgaaagcccagacctgcagcagaactctccaactctctatcagctttcagggttttctctcctgggaagggtgtaaaatcagcttgtcagattcttcttacagagagtatccaatcggtattggtggagcggctccctatttatacaataggaagcatgggtgcttagaaagtttatttcaggaggaaaatgggttcacacaaaaagcaaactacattctgatctgctcagggagaagcttgcctttgaactggaagatgttgggatgagcagggaaagcttagactttggagtcaggtttgtgttcagaatccagccctgctggctactaactaactgggagaccttaggcaaagcatgcaatcgctctgaatggcagtttcctcatttttaaacagggataataaaactaatattgcaggggagttacagggttaaataagatcctgtgtgtaaccccaagcattggatgactcatagaatggccttttttgtcagcataatcgtcatcattatttagatactttcttccttcactcacccagcaggtcagttttctgtgcaaacaaacctgtttaggattcttccaaatgttcttcctggggtctttgatatttgtttgttacatcctgctgaagttcgactgtgtttttattttttcatccaacttccatttttcactttttacatgattactcaatccttggggctgtccatgtcatctcttagatttcttaaaagacattttaatgtatggttaggttttatatttttattttttaaaaaagaaatagtcagtgttttcctcctttcaaccgagactatttctggattgtgtgctcctcgtcagttgacttgttttgcacacttttctttacttcatgtccccatcaacaaccgtcctgctccccacctcccccaggaaataaggggcctgctcctctccctactgtgaccctggaggctcttaagatgatgatggttttttttattgggctgagttcacgaattaggggcaggagctggaagtcgccctaggaacaccagatttcctggttctgttcaagttggcatttcttgtttggaataaactatttcttggacattccttc

SEQ ID NO: 266 - DNA, 3948 bp, Homo sapiens
ggcaagggacggagaacggggcggaggcggagtcagggcgcccgcgcgtgggccccgcccccttatgtagggtataaagcccctcccgctcacagtttccctagtcctcgaaggctcggaagcccgtcaccatgtcgtgcgagtcgtctatggttctcgggtactgggatattcgtgggctggcgcacgccatccgcctgctcctggagttcacggatacctcttatgaggagaaacggtacacgtgcggggaagctcctgactatgatcgaagccaatggctggatgtgaaattcaagctagacctggactttcctaatctgccctacctcctggatgggaagaacaagatcacccagagcaatgccatcttgcgctacatcgctcgcaagcacaacatgtgtggtgagactgaagaagaaaagattcgagtggacatcatagagaaccaagtaatggatttccgcacacaactgataaggctctgttacagctctgaccacgaaaaactgaagcctcagtacttggaagagctacctggacaactgaaacaattctccatgtttctggggaaattctcatggtttgccggggaaaagctcacctttgtggattttctcacctatgatatcttggatcagaaccgtatatttgaccccaagtgcctggatgagttcccaaacctgaaggctttcatgtgccgttttgaggctttggagaaaatcgctgcctacttacagtctgatcagttctgcaagatgcccatcaacaacaagatggcccagtggggcaacaagcctgtatgctgagcaggaggcagacttgcagagcttgttttgtttcatcctgtccgtaaggggtcagcgctcttgctttgctcttttcaatgaatagcacttatgttactggtgtccagctgagtttctcttgggtataaaggctaaaagggaaaaaggatatgtggagaatcatcaagatatgaattgaatcgctgcgatactggcatttccctactccccaactgagttcaagggctgtaggttcatgcccaagccctgagagtgggtactagaaaaaacgagattgcacagttggagagagcaggtgtgttaaatgggactggagtccctgtgaagactgggtgaggataacacaagtaaaactgtggtactgatggacttaaccggagttcggaaaccgtcctgtgtacacatgggagtttagtgtgataaaggcagtatttcagactggtgggctagccaatagagttgggacaattgcttactcattaaaaataatagagccccacttgacactattcactaaaattaatctggaatttaaggcccaacattaaacacaaagctgttgaaatattgatgaaaatgtaagaatttttgtgaccacggggtaggagaagtttctttaaagacgtaaaaagaaaaaaaccataggctgctctgcctgtggagtagccattctttattcttttactttttaaaataataacaatcacaaaggaaagatttgccaattgaataggatcaaattctacaacttttcctaaggcacccacaaataaatgacaagtgagacaaaaagcactagtataaagattatataaagacctataaatcattaagacaactgagtttttaaaaatggacaaaatccatgaacaatttataaaatagaaatatagccaaaaatgtctaaaagatgtttatgatgtaaggaattatcaattacaacagtgagaaaccatatttccttctatccgatgagtaaaaagtttctaaagtgttggcaaggcttaggaaagtgatatgcatttcctgctggtcaagttgtaaattagtatagctactttggaggacaattgtaaaatttaaatcatatcctatgacccagcaattccatgctataaaaactcatccatggccgggcttggtggctcacgcctgtaatcccagcactttgggaggctgaggtgggcagatcacgaggtcaagagatcgagaccatcctggccaacatgatgaaaccccgtttctactaaaaatacaaaaattagctgggcatggtggcatgtgcctatagtcccagctactcaggaggctgaggcaggagaattgcttgaacctgggaggcagaggttgcagtgagccgagatcacgccactgcactccagcctggctacagggcgagactctgtctcaaaaaaaaaaaaaaaaaaaaaaaaaaaacattcaaagagacatatactaagatgttcactgtggcattgtctgtaatgacaaataagtggaaaccgtgtaaatacctgtcaatactatggagtaccatgtggcaacggaagaatgagactgaactgtgtgaactaacatgcaaagatccccaaaacaggccaggtgtggttgctcacagctgtaataacaacaccttcagaggctgaggtgagaggatcagttgaggccaggagtttaagaccagcctgggcaacatagtgagacccctgtctcccaaaaattttttttaattagctgtgcgcaattgctcatgcatagtcccagctacccaggaggctgaggtgggaggatcacttgagcccaggaatttgaagctgcagtgagctgtgttcttgccactgcactccaatctgggtgactgagcaagaccctgtctcttaaaaaaataaaaaagatctccaagcatagagaagagtctggagggaaacaccaaactcataacagtcttactgcaggcaagtgggataaaggcccagactccatggtggaagttaaagggcatttccaagttaaggctaagacttgcttttctaactaagagaatgtgctcatgcattgcttgtgtagtagaaactagtttttagaaaagaaagcaaacttaagaaacactgactcctgtggagatgacttggcaccactctcctttcacagagcagagtctgaatagtcttcagagataggcctgtgggccagattgccatcccctatggaccagaagccaaggatctctctagtgatggtcagagggcccaaatggcagggatacccagtgatgtcaggaggaatagtacagacagaaggtgctaagcagacaattcaactgccatgttttgccaccccctgtgagcagggattaggtgttcaggccagtatcttgggcatgggggagcctttggccagaagaggtataaagctcagaagtttttcagtctgataactattgatataatttccatagtgtgagggagcggtatgctctacccttgtgtatttaaggcaggacagagaaattgaggatgcccctggggctagatcgatgatatgaccagaaatcaaaaagggaatgcattatttattgctgtgtaacactgttaagagaggaggtagttaagggatggataggcacatagagagggaaggtctcaggagaagggatagaaaggaactatgttcacaagaacaacggcaagacagtgcctatactgcctctacagttaataggaaaaacggaagaagttacccttaagctaggatgttgctcagaagtgaccatcccaactttggtgcgggcacaataaatcagcctaaatgtccctaatttaacccagctcattataatgtcattaaacatgacattagcattgtggttttagcacccccatgggttttgcttaggcactcatgggtaataaccaagatggagtccctttggcaaaacttaggcatgcacagctgtagtaccccaagaagaaaatgttacttctctcatctgggcaaaacccacagaagacttcccagcttctgccacataaaagacacagaacacagacgccttactggcaacctgctttcaagacccctgtctttgctgagagctttcctttttcccaataaattctactctgccctactcactctc

SEQ ID NO: 267 - DNA, 1840 bp, Homo sapiens
gcggcgcgagccacatgcgagcgggcgcctggcggcggcggcggcggcaccagcgatcccagcagcggccacgacgcggacgcgcctgcggcccggggagcagcagcagccacagccacagcagccgccactgcagttagagcggcagcagcagcgacagccacagcagcagccgccgcggagagcggcgctcggcgggcgcgccctcctgaaggaagccgcccgccccccaccgccgccccctccggcgtgttcatgcccccggggccccagggagcgccatggcccgcgcacgccaggagggcagctccccggagcccgtagagggcctggcccgcgacggcccgcgccccttcccgctcggccgcctggtgccctcggcagtgtcctgcggcctctgcgagcccggcctggctgccgcccccgccgcccccaccctgctgcccgctgcctacctctgcgcccccaccgccccacccgccgtcaccgccgccctggggggttcccgctggcctgggggtccccgcagccggccccgaggcccgcgcccggacggtcctcagccctcgctctcgctggcggagcagcacctggagtcgcccgtgcccagcgccccgggggctctggcgggcggtcccacccaggcggccccgggagtccgcggggaggaggaacagtgggcccgggagatcggggcccagctgcggcggatggcggacgacctcaacgcacagtacgagcggcggagacaagaggagcagcagcggcaccgcccctcaccctggagggtcctgtacaatctcatcatgggactcctgcccttacccaggggccacagagcccccgagatggagcccaattaggtgcctgcacccgcccggtggacgtcagggactcggggggcaggcccctcccacctcctgacaccctggccagcgcgggggactttctctgcaccatgtagcatactggactcccagccctgcctgtcccgggggcgggccggggcagccactccagccccagcccagcctggggtgcactgacggagatgcggactcctgggtccctggccaagaagccaggagagggacggctgatggactcagcatcggaaggtggcggtgaccgagggggtggggactgagccgcccgcctctgccgcccaccaccatctcaggaaaggctgttgtgctggtgcccgttccagctgcaggggtgacactgggggggggggggctctcctctcggtgctccttcactctgggcctggcctcaggcccctggtgcttccccccctcctcctgggagggggcccgtgaagagcaaatgagccaaacgtgaccactagcctcctggagccagagagtggggctcgtttgccggttgctccagcccggcgcccagccatcttccctgagccagccggcgggtggtgggcatgcctgcctcaccttcatcagggggtggccaggaggggcccagactgtgaatcctgtgctctgcccgtgaccgccccccgccccatcaatcccattgcataggtttagagagagcgacgtgtgaccactggcattcatttggggggtgggagattttggctgaagccgccccagccttagtccccagggccaagcgctggggggaagacggggagtcagggagggggggaaatctcggaagagggaggagtctgggagtggggagggatggcccagcctgtaagatactgtatatgcgctgctgtagataccggaatgaattttctgtacatgtttggttaattttttttgtacatgatttttgtatgtttccttttcaataaaatcagattggaaca

SEQ ID NO: 268 - DNA, 3737 bp, Homo sapiens
ggcgtccgcgcacacctccccgcgccgccgccgccaccgcccgcactccgccgcctctgcccgcaaccgctgagccatccatgggggtcgcgggccgcaaccgtcccggggcggcctgggcggtgctgctgctgctgctgctgctgccgccactgctgctgctggcgggggccgtcccgccgggtcggggccgtgccgcggggccgcaggaggatgtagatgagtgtgcccaagggctagatgactgccatgccgacgccctgtgtcagaacacacccacctcctacaagtgctcctgcaagcctggctaccaaggggaaggcaggcagtgtgaggacatcgatgaatgtggaaatgagctcaatggaggctgtgtccatgactgtttgaatattccaggcaattatcgttgcacttgttttgatggcttcatgttggctcatgacggtcataattgtcttgatgtggacgagtgcctggagaacaatggcggctgccagcatacctgtgtcaacgtcatggggagctatgagtgctgctgcaaggaggggtttttcctgagtgacaatcagcacacctgcattcaccgctcggaagagggcctgagctgcatgaataaggatcacggctgtagtcacatctgcaaggaggccccaaggggcagcgtcgcctgtgagtgcaggcctggttttgagctggccaagaaccagagagactgcatcttgacctgtaaccatgggaacggtgggtgccagcactcctgtgacgatacagccgatggcccagagtgcagctgccatccacagtacaagatgcacacagatgggaggagctgccttgagcgagaggacactgtcctggaggtgacagagagcaacaccacatcagtggtggatggggataaacgggtgaaacggcggctgctcatggaaacgtgtgctgtcaacaatggaggctgtgaccgcacctgtaaggatacttcgacaggtgtccactgcagttgtcctgttggattcactctccagttggatgggaagacatgtaaagatattgatgagtgccagacccgcaatggaggttgtgatcatttctgcaaaaacatcgtgggcagttttgactgcggctgcaagaaaggatttaaattattaacagatgagaagtcttgccaagatgtggatgagtgctctttggataggacctgtgaccacagctgcatcaaccaccctggcacatttgcttgtgcttgcaaccgagggtacaccctgtatggcttcacccactgtggagacaccaatgagtgcagcatcaacaacggaggctgtcagcaggtctgtgtgaacacagtgggcagctatgaatgccagtgccaccctgggtacaagctccactggaataaaaaagactgtgtggaagtgaaggggctcctgcccacaagtgtgtcaccccgtgtgtccctgcactgcggtaagagtggtggaggagacgggtgcttcctcagatgtcactctggcattcacctctcttcagatgtcaccaccatcaggacaagtgtaacctttaagctaaatgaaggcaagtgtagtttgaaaaatgctgagctgtttcccgagggtctgcgaccagcactaccagagaagcacagctcagtaaaagagagcttccgctacgtaaaccttacatgcagctctggcaagcaagtcccaggagcccctggccgaccaagcacccctaaggaaatgtttatcactgttgagtttgagcttgaaactaaccaaaaggaggtgacagcttcttgtgacctgagctgcatcgtaaagcgaaccgagaagcggctccgtaaagccatccgcacgctcagaaaggccgtccacagggagcagtttcacctccagctctcaggcatgaacctcgacgtggctaaaaagcctcccagaacatctgaacgccaggcagagtcctgtggagtgggccagggtcatgcagaaaaccaatgtgtcagttgcagggctgggacctattatgatggagcacgagaacgctgcattttatgtccaaatggaaccttccaaaatgaggaaggacaaatgacttgtgaaccatgcccaagaccaggaaattctggggccctgaagaccccagaagcttggaatatgtctgaatgtggaggtctgtgtcaacctggtgaatattctgcagatggctttgcaccttgccagctctgtgccctgggcacgttccagcctgaagctggtcgaacttcctgcttcccctgtggaggaggccttgccaccaaacatcagggagctacttcctttcaggactgtgaaaccagagttcaatgttcacctggacatttctacaacaccaccactcaccgatgtattcgttgcccagtgggaacataccagcctgaatttggaaaaaataattgtgtttcttgcccaggaaatactacgactgactttgatggctccacaaacataacccagtgtaaaaacagaagatgtggaggggagctgggagatttcactgggtacattgaatccccaaactacccaggcaattacccagccaacaccgagtgtacgtggaccatcaacccaccccccaagcgccgcatcctgatcgtggtccctgagatcttcctgcccatagaggacgactgtggggactatctggtgatgcggaaaacctcttcatccaattctgtgacaacatatgaaacctgccagacctacgaacgccccatcgccttcacctccaggtcaaagaagctgtggattcagttcaagtccaatgaagggaacagcgctagagggttccaggtcccatacgtgacatatgatgaggactaccaggaactcattgaagacatagttcgagatggcaggctctatgcatctgagaaccatcaggaaatacttaaggataagaaacttatcaaggctctgtttgatgtcctggcccatccccagaactatttcaagtacacagcccaggagtcccgagagatgtttccaagatcgttcatccgattgctacgttccaaagtgtccaggtttttgagaccttacaaatgactcagcccacgtgccactcaatacaaatgttctgctatagggttggtgggacagagctgtcttccttctgcatgtcagcacagtcgggtattgctgcctcccgtatcagtgactcattagagttcaatttttatagataatacagatattttggtaaattgaacttggtttttctttcccagcatcgtggatgtagactgagaatggctttgagtggcatcagcttctcactgctgtgggcggatgtcttggatagatcacgggctggctgagctggactttggtcagcctaggtgagactcacctgtccttctggggtcttactcctcctcaaggagtctgtagtggaaaggaggccacagaataagctgcttattctgaaacttcagcttcctctagcccggccctctctaagggagccctctgcactcgtgtgcaggctctgaccaggcagaacaggcaagaggggagggaaggagacccctgcaggctccctccacccaccttgagacctgggaggactcagtttctccacagccttctccagcctgtgtgatacaagtttgatcccaggaacttgagttctaagcagtgctcgtgaaaaaaaaaagcagaaagaattagaaataaataaaaactaagcacttctggagacat

SEQ ID NO: 269 - DNA, 2819 bp, Homo sapiens
ctgggcccagctcccccgagaggtggtcggatcctctgggctgctcggtcgatgcctgtgccactgacgtccaggcatgaggtggttcctgccctggacgctggcagcagtgacagcagcagccgccagcaccgtcctggccacggccctctctccagcccctacgaccatggactttaccccagctccactggaggacacctcctcacgcccccaattctgcaagtggccatgtgagtgcccgccatccccaccccgctgcccgctgggggtcagcctcatcacagatggctgtgagtgctgtaagatgtgcgctcagcagcttggggacaactgcacggaggctgccatctgtgacccccaccggggcctctactgtgactacagcggggaccgcccgaggtacgcaataggagtgtgtgcacaggtggtcggtgtgggctgcgtcctggatggggtgcgctacaacaacggccagtccttccagcctaactgcaagtacaactgcacgtgcatcgacggcgcggtgggctgcacaccactgtgcctccgagtgcgccccccgcgtctctggtgcccccacccgcggcgcgtgagcatacctggccactgctgtgagcagtgggtatgtgaggacgacgccaagaggccacgcaagaccgcaccccgtgacacaggagccttcgatgctgtgggtgaggtggaggcatggcacaggaactgcatagcctacacaagcccctggagcccttgctccaccagctgcggcctgggggtctccactcggatctccaatgttaacgcccagtgctggcctgagcaagagagccgcctctgcaacttgcggccatgcgatgtggacatccatacactcattaaggcagggaagaagtgtctggctgtgtaccagccagaggcatccatgaacttcacacttgcgggctgcatcagcacacgctcctatcaacccaagtactgtggagtttgcatggacaataggtgctgcatcccctacaagtctaagactatcgacgtgtccttccagtgtcctgatgggcttggcttctcccgccaggtcctatggattaatgcctgcttctgtaacctgagctgtaggaatcccaatgacatctttgctgacttggaatcctaccctgacttctcagaaattgccaactaggcaggcacaaatcttgggtcttggggactaacccaatgcctgtgaagcagtcagcccttatggccaataacttttcaccaatgagccttagttaccctgatctggacccttggcctccatttctgtctctaaccattcaaatgacgcctgatggtgctgctcaggcccatgctatgagttttctccttgatatcattcagcatctactctaaagaaaaatgcctgtctctagctgttctggactacacccaagcctgatccagcctttccaagtcactagaagtcctgctggatcttgcctaaatcccaagaaatggaatcaggtagacttttaatatcactaatttcttctttagatgccaaaccacaagactctttgggtccattcagatgaatagatggaatttggaacaatagaataatctattatttggagcctgccaagaggtactgtaatgggtaattctgacgtcagcgcaccaaaactatcctgattccaaatatgtatgcacctcaaggtcatcaaacatttgccaagtgagttgaatagttgcttaattttgatttttaatggaaagttgtatccattaacctgggcattgttgaggttaagtttctcttcacccctacactgtgaagggtacagattaggtttgtcccagtcagaaataaaatttgataaacattcctgttgatgggaaaagcccccagttaatactccagagacagggaaaggtcagcccgtttcagaaggaccaattgactctcacactgaatcagctgctgactggcagggctttgggcagttggccaggctcttccttgaatcttctcccttgtcctgcttggggttcataggaattggtaaggcctctggactggcctgtctggcccctgagagtggtgccctggaacactcctctactcttacagagccttgagagacccagctgcagaccatgccagacccactgaaatgaccaagacaggttcaggtaggggtgtgggtcaaaccaagaagtgggtgcccttggtagcagcctggggtgacctctagagctggaggctgtgggactccaggggcccccgtgttcaggacacatctattgcagagactcatttcacagcctttcgttctgctgaccaaatggccagttttctggtaggaagatggaggtttaccggttgtttagaaacagaaatagacttaataaaggtttaaagctgaagaggttgaagctaaaaggaaaaggttgttgttaatgaatatcaggctattatttattgtattaggaaaatataatatttactgttagaattcttttatttagggccttttctgtgccagacattgctctcagtgctttgcatgtattagctcactgaatcttcacgacaatgttgagaagttcccattattatttctgttcttacaaatgtgaaacggaagctcatagaggtgagaaaactcaaccagagtcacccagttggtgactgggaaagttaggattcagatcgaaattggactgtctttataacccatattttccccctgtttttagagcttccaaatgtgtcagaataggaaaacattgcaataaatggcttgattttttaaaaaaaaaaaaaaaaaaaaaaa

SEQ ID NO: 270 - DNA, 1035 bp, Homo sapiens
ctgggcccagctcccccgagaggtggtcggatcctctgggctgctcggtcgatgcctgtgccactgacgtccaggcatgaggtggttcctgccctggacgctggcagcagtgacagcagcagccgccagcaccgtcctggccacggccctctctccagcccctacgaccatggactttaccccagctccactggaggacacctcctcacgcccccaattctgcaagtggccatgtgagtgcccgccatccccaccccgctgcccgctgggggtcagcctcatcacagatggctgtgagtgctgtaagatgtgcgctcagcagcttggggacaactgcacggaggctgccatctgtgacccccaccggggcctctactgtgactacagcggggaccgcccgaggtacgcaataggagtgtgtgcacatgctgtgggtgaggtggaggcatggcacaggaactgcatagcctacacaagcccctggagcccttgctccaccagctgcggcctgggggtctccactcggatctccaatgttaacgcccagtgctggcctgagcaagagagccgcctctgcaacttgcggccatgcgatgtggacatccatacactcattaaggcagggaagaagtgtctggctgtgtaccagccagaggcatccatgaacttcacacttgcgggctgcatcagcacacgctcctatcaacccaagtactgtggagtttgcatggacaataggtgctgcatcccctacaagtctaagactatcgacgtgtccttccagtgtcctgatgggcttggcttctcccgccaggtcctatggattaatgcctgcttctgtaacctgagctgtaggaatcccaatgacatctttgctgacttggaatcctaccctgacttctcagaaattgccaactaggcaggcacaaatcttgggtcttggggactaacccaatgcctgtgaagcagtcagcccttatggccaataacttttcaccaatgagccttagttaccctgaaaaaaaaaaaaaaaaa

SEQ ID NO: 271 - DNA, 3160 bp, Homo sapiens
attctcgccgcgcccgggcggacgatccagcgaacagccccgcttctaacccgagatgctgctgccggcgcccgcgctccgccgcgccctgctgtcccgcccctggaccggggccggcctgcggtggaagcacacctcctccctgaaggtggccaacgagcccgtcttagccttcacgcagggcagccctgagcgagatgccctgcaaaaggccttgaaggacctgaagggccggatggaagccatcccatgcgtggtgggggatgaggaggtgtggacgtcggacgtgcagtaccaagtgtcgccttttaaccatggacataaggtggccaagttctgttatgcagacaagagcctgctcaacaaagccattgaggctgccctggctgcccggaaagagtgggacctgaagcctattgcagaccgggcccagatcttcctgaaggcggcagacatgctgagtgggccgcgcagggctgagatcctcgccaagaccatggtgggacagggtaagaccgtgatccaagcggagattgacgctgcagcggaactcatcgacttcttccggttcaatgccaagtatgcggtggagctggaggggcagcagcccatcagcgtgcccccgagcaccaacagcacggtgtaccggggtctggagggcttcgtggcggccatctcgccctttaacttcactgcaatcggcggcaacctggcgggggcaccggccctgatgggcaacgtggtcctatggaagcccagtgacactgccatgctggccagctatgctgtctaccgcatccttcgggaggctggcctgccccccaacatcatccagtttgtgccagctgatgggcccctatttggggacactgtcaccagctcagagcacctctgtggcatcaacttcacaggcagtgtgcccaccttcaaacacctgtggaagcaggtggcccagaacctggaccggttccacaccttcccacgcctggctggagagtgcggcggaaagaacttccacttcgtgcaccgctcggccgacgtggagagcgtggtgagcgggaccctccgctcagccttcgagtacggtggccagaagtgttccgcctgctcgcgtctctacgtgccgcactcgctgtggccgcagatcaaagggcggctgctggaggagcacagtcggatcaaagtgggcgaccctgcagaggattttgggaccttcttctctgcagtgattgatgccaagtcctttgcccgtatcaagaagtggctggagcacgcgcgctcctcgcccagcctcaccatcctggctgggggcaagtgtgatgactccgtgggctactttgtggagccctgcatcgtggagagcaaggaccctcaggagcccatcatgaaggaggagatcttcgggcctgtactgtctgtgtacgtctacccggacgacaagtacaaggagacgctgcagctggttgacagcaccaccagctatggcctcacgggggcagtgttctcccaggataaggacgtcgtgcaggaggccacaaaggtgctgaggaatgctgccggcaacttctacatcaacgacaagtccactggctcgatagtgggccagcagccctttgggggggcccgagcctctggaaccaatgacaagccagggggcccacactacatcctgcgctggacgtcgccgcaggtcatcaaggagacacataagcccctgggggactggagctacgcgtacatgcagtgagcccctctcgggctccaccgtccagctgtctgtccgtccaggtggccgacctcactgcacagaccccactccagcccctccaccccttcttcatgcacagctgcctttctataatccgggcttgactcccttcttaccactgtattctggcctctcccatgcctcaggctctggtttgagatcgtgctggggaggaacatggccactaccccttatcccatcggccatgtgggaggtatgaccctggtgcctggcaggttctccctctgccctccactgggcccagtggctcagggacctggggaaaggagatggagcagctcttgggatcctttggggaaaaggaggccattctgggccccttggcaaacctcaccactcacagaggctcctggccttgatccctgcccctccaggtgtccagggtaaagtgtaactcagactgacctgtggggcacagggggcaccagctggccttgccctctctggtctgggctgtctaccttcctcactgtatctttgcccagacccacctgggccagtaggcccctgtccccagccacacaccttagatgctggcatgccttactccaggtgcctgtgtttggccgaggcctgtgtgattcccggtctgcaccacatggcggggttggggggccgctggaggccacctgccaaggcgtgggatgggatggtcctgccggtttaggccgtgattctggaaaaccttggatgggccttcgtcctatgtcagccttccctttgatcctcaggccctacctgtagagacctccactcctagagccagtctcagggtctgggatttccctgcaggagctcagccaccactgtgccatggtgacacaggccaaggcagacattggccctcccttctcccagcccccagaggcctggccttgggttcgtcagcatgggccgaggacgttgcctgtagaatcctcctctgcctgggagtggctctgtgtggaccagtccctcactggcccattctttttttgacgcagccaatctgtgaccacgattcctcccacagatgcctcctgcttggattctgagtggtcagagatctgtaaagcatgactttcaaggatggttcttaggggactgtgaaagtgttgggtcttcctccaggatgcctgcatgggaccccacccggagctggtgtggccattccccaagtgccactggcccatggatgggggtgggtgctggtgccagctgggctgggtgtgggttctgtgtccttccaggatatgtgtcatttcccatgaggggccggggcaggtggctgggtgggggcacaggctggagtattcttagttctactggttctacactgtgaggtggcaatgggatttgctcagatgccacccaataaaatgcctgttactt

SEQ ID NO: 272 - DNA, 2147 bp, Homo sapiens
attctcgccgcgcccgggcggacgatccagcgaacagccccgcttctaacccgagatgctgctgccggcgcccgcgctccgccgcgccctgctgtcccgcccctggaccggggccggcctgcggtggaagcacacctcctccctgaaggtggccaacgagcccgtcttagccttcacgcagggcagccctgagcgagatgccctgcaaaaggccttgaaggacctgaagggccggatggaagccatcccatgcgtggtgggggatgaggaggtgtggacgtcggacgtgcagtaccaagtgtcgccttttaaccatggacataaggtggccaagttctgttatgcagacaagagcctgctcaacaaagccattgaggctgccctggctgcccggaaagagtgggacctgaagcctattgcagaccgggcccagatcttcctgaaggcggcagacatgctgagtgggccgcgcagggctgagatcctcgccaagaccatggtgggacagggtaagaccgtgatccaagcggagattgacgctgcagcggaactcatcgacttcttccggttcaatgccaagtatgcggtggagctggaggggcagcagcccatcagcgtgcccccgagcaccaacagcacggtgtaccggggtctggagggcttcgtggcggccatctcgccctttaacttcactgcaatcggcggcaacctggcgggggcaccggccctgatgggcaacgtggtcctatggaagcccagtgacactgccatgctggccagctatgctgtctaccgcatccttcgggaggctggcctgccccccaacatcatccagtttgtgccagctgatgggcccctatttggggacactgtcaccagctcagagcacctctgtggcatcaacttcacaggcagtgtgcccaccttcaaacacctgtggaagcaggtggcccagaacctggaccggttccacaccttcccacgcctggctggagagtgcggcggaaagaacttccacttcgtgcaccgctcggccgacgtggagagcgtggtgagcgggaccctccgctcagccttcgagtacggtggccagaagtgttccgcctgctcgcgtctctacgtgccgcactcgctgtggccgcagatcaaagggcggctgctggaggagcacagtcggatcaaagtgggcgaccctgcagaggattttgggaccttcttctctgcagtgattgatgccaagtcctttgcccgtatcaagaagtggctggagcacgcgcgctcctcgcccagcctcaccatcctggctgggggcaagtgtgatgactccgtgggctactttgtggagccctgcatcgtggagagcaaggaccctcaggagcccatcatgaaggaggagatcttcgggcctgtactgtctgtgtacgtctacccggacgacaagtacaaggagacgctgcagctggttgacagcaccaccagctatggcctcacgggggcagtgttctcccaggataaggacgtcgtgcaggaggccacaaaggtgctgaggaatgctgccggcaacttctacatcaacgacaagtccactggctcgatagtgggccagcagccctttgggggggcccgagcctctggaaccaatgacaagccagggggcccacactacatcctgcgctggacgtcgccgcaggtcatcaaggagacacataagcccctgggggactggagctacgcgtacatgcagtgagcccctctcgggctccaccgtccagctgtctgtccgtccagatgcctcctgcttggattctgagtggtcagagatctgtaaagcatgactttcaaggatggttcttaggggactgtgaaagtgttgggtcttcctccaggatgcctgcatgggaccccacccggagctggtgtggccattccccaagtgccactggcccatggatgggggtgggtgctggtgccagctgggctgggtgtgggttctgtgtccttccaggatatgtgtcatttcccatgaggggccggggcaggtggctgggtgggggcacaggctggagtattcttagttctactggttctacactgtgaggtggcaatgggatttgctcagatgccacccaataaaatgcctgttactt

SEQ ID NO: 273 - DNA, 3139 bp, Homo sapiens
atgaggccgcgaagacgccggggcttcgtccggcggcgacggggaggccgcggaggttcccgagcgcagcggggcgcgcacctcccgctcgggccgggctccctcgccgcgcggccccggatcctccctgcgcgggtttccgtggcccccgccgggctcttccgttccctcccgcggcctcgaccaggccgcagcccccagcccaggcgaccgactcgccagggtccgccccgccgccgcggcccgggcccggccgctcctcccccgatgatcggcggcggcggcggcggcggcggcgggatggcccgggcccgaggccaggccccggggagcggcgggcggcggcggccgcggcggggcggcgcgggaaccgggccccggggggagtcggccgggctgctgctgctgctgctccaggtgctgccgcccggggctacggcagggccgggacgccggggcacgcggggcgctggcgctggcggcggcggcgtctgctggcccggcgcggccccagcctttccccgggacgcgcggctgctgctgctcctgccgccgctgccgccactgtcgccgccgccgccgagctccgcgcccgcagcctccgcctcccggatggacgctctgccccgcagcgggctgaacctgaaggaggagccgctgctgcccgccggcctgggctcagtgcgctcctggatgcagggcgcgggcatcctggacgccagcaccgcggcgcagagtggcgtgggtctggcacgagcacattttgagaagcagcctccctccaacctcaggaaatccaacttcttccacttcgtgctggccatgtacgaccggcaggggcagcccgtggaggtggagcgcacagccttcatcgacttcgtggaaaaggaccgagagcccggggcggaaaagactaacaatgggatccattaccgcctccggctggtgtataacaatggactgcggacagagcaagacctctacgtgcgtctcatcgactccatgtccaaacaggccatcatctatgaggggcaggacaagaaccccgaaatgtgccgagtgctgctcacccatgagatcatgtgcagccggtgctgtgaccggaagagctgtggcaaccggaatgagacgccctcagaccccgtcatcattgacaggttcttcctcaagttcttcctcaaatgcaaccagaactgcctgaagaatgcggggaatcccagagacatgcgccgcttccaggtggtggtgtccacgacggtgagcgtggacggacacgtgctggccgtgtccgacaacatgtttgtgcacaacaactccaagcatggccgcagggcgcgccgcctggacccctccgaagctgccaccccctgcatcaaggccatcagccccggggagggctggaccacgggcggcgccaccgtcattgtcatcggcgacaacttcttcgacgggttgcaggtcgtgttcggaaacgtgctcgtgtggagcgagctcatcacgccccacgccatccgggtgcagacgcccccgcggcacatccccggggtggtggaggtgaccctctcctacaagtccaagcagttttgcaagggatgccccggccgctttgtctacacagctctgaacgagcccaccattgactacggattccagaggctacagaaagtcattcccagacaccccggagaccccgagaggctgcccaaggaagtgctgctgaagcgggcggccgacttggcagaagccctgtacggagtgcccggcagtaaccaggagctgctcctgaagcgcgcggcggacgtggccgaggctctgtacagcaccccccgcgcacccgggccgctcgcacccctggccccgagccacccacaccccgccgtcgtgggcatcaacgccttcagcagcccgctggccatcgccgtcggggacgccaccccggggcccgagccgggctacgcgcgcagctgcagcagcgcgtccccccgcgggttcgcgcccagccccggctcgcagcagagcggctacggcggcggcctcggagctggcctgggcggctacggcgcgccgggcgtggccggcctcggcgtgcctgggtcccccagcttcctcaatggctccaccgccacctcgcccttcgccaaggagcgccttcgcccccgtgctgcgccccccaagctccccaccccaggcctgccccagagcccacggagaggggcttccagaccagtcttttgaggattctgacaagtttcactctccagcccgggggcttcagggcctggcatactcctaattacggtctgcagctgttcccatggagcccggactggaggtccctctgggattcacagccacaccccggatggtggcacagacagatgcagggccagggccatgggcggacctcaacccgtgagctgaacggggagaggccttcaccccatgctcaagcctccccgctagcagccccacaggcttctctcgcctccctgtcttggggtagtcagaagccccagcactgtgcagatgctcttggcaggacagcatcgcagggaggtgctgggattctgggcctcactgtctgggtcttggttcctctgaaagagatggatcttgtgcagaccagggttgttgagtgaggggagcgtgggatggggaccgtgggaaagaggacagctcagggagaagtgacctggaaaggtcctgtttgcatctgacccatctcaactggcccagcatcccaacttctctgcagcgaaagggtggcgccccgcagcctcgggaggcctgcccaggctcccgtggagcttccaacagctgcttggccccgcagctgcccccacttcctttgagacctgcactctcatgcttgccgcatcatgcctccctgtgggggctttgggcatggaggaggcagaagagggggtgccaggcctcctgtatttggggtcttcccccagtggatgtctcatggactctggccccacacactcacaatgactctggctggccccacgcagcgggcccagccgccccccaggtggcctcacattctgctctgctaagtttggagaaaacagaacaataaaccagatgcaggtggtgcccgcccggcctctcacctgcctccttggtgtga

SEQ ID NO: 274 - DNA, 1546 bp, Homo sapiens
cacggccggagagacgcggaggaggagacatgagccggcgggcgcccagacggagcggccgtgacgctttcgcgctgcagccgcgcgccccgaccccggagcgctgacccctggccccacgcagctccgcgcccgggccggagagcgcaactcggcttccagacccgccgcgcatgctgtccccggactgagccgggcagccagcctcccacggacgcccggacggccggccggccagcagtgagcgagcttccccgcaccggccaggcgcctcctgcacagcggctgccgccccgcagcccctgcgccagcccggagggcgcagcgctcgggaggagccgcgcggggcgctgatgccgcagggcgcgccgcggagcgccccggagcagcagagtctgcagcagcagcagccggcgaggagggagcagcagcagcggcggcggcggcggcggcggcggcggaggcgcccggtcccggccgcgcggagcggacatgtgcaggctgggctaggagccgccgcctccctcccgcccagcgatgtattcagcgccctccgcctgcacttgcctgtgtttacacttcctgctgctgtgcttccaggtacaggtgctggttgccgaggagaacgtggacttccgcatccacgtggagaaccagacgcgggctcgggacgatgtgagccgtaagcagctgcggctgtaccagctctacagccggaccagtgggaaacacatccaggtcctgggccgcaggatcagtgcccgcggcgaggatggggacaagtatgcccagctcctagtggagacagacaccttcggtagtcaagtccggatcaagggcaaggagacggaattctacctgtgcatgaaccgcaaaggcaagctcgtggggaagcccgatggcaccagcaaggagtgtgtgttcatcgagaaggttctggagaacaactacacggccctgatgtcggctaagtactccggctggtacgtgggcttcaccaagaaggggcggccgcggaagggccccaagacccgggagaaccagcaggacgtgcatttcatgaagcgctaccccaaggggcagccggagcttcagaagcccttcaagtacacgacggtgaccaagaggtcccgtcggatccggcccacacaccctgcctaggccaccccgccgcggcccctcaggtcgccctggccacactcacactcccagaaaactgcatcagaggaatatttttacatgaaaaataaggaagaagctctatttttgtacattgtgtttaaaagaagacaaaaactgaaccaaaactcttggggggaggggtgataaggattttattgttgacttgaaacccccgatgacaaaagactcacgcaaagggactgtagtcaacccacaggtgcttgtctctctctaggaacagacaactctaaactcgtccccagaggaggacttgaatgaggaaaccaacactttgagaaaccaaagtcctttttcccaaaggttctgaaaggaaaaaaaaaaaaaaacaaaaaaaaaaaaaaaa

SEQ ID NO: 275 - DNA, 2288 bp, Homo sapiens; identical to SEQ ID NO: 158

SEQ ID NO: 276 - DNA, 2285 bp, Homo sapiens
aaagttaagagtggcgccagggatttgaaccgcgctgacgaagtttggtgatccatcttccgagtatcgccgggatttcgaatcgcgatgatcatcccctctctagaggagctggactccctcaagtacagtgacctgcagaacttagccaagagtctgggtctccgggccaacctgagggcaaccaagttgttaaaagccttgaaaggctacattaaacatgaggcaagaaaaggaaatgagaatcaggatgaaagtcaaacttctgcatcctcttgtgatgagactgagatacagatcagcaaccaggaagaagctgagagacagccacttggccatgtcaccaaaacaaggagaaggtgcaagactgtccgtgtggaccctgactcacagcagaatcattcagagataaaaataagtaatcccactgaattccagaatcatgaaaagcaggaaagccaggatctcagagctactgcaaaagttccttctccaccagacgagcaccaagaagctgagaatgctgtttcctcaggtaacagagattcaaaggtaccttcagaaggaaagaaatctctctacacagatgagtcatccaaacctggaaaaaataaaagaactgcaatcactactccaaactttaagaagcttcatgaagctcattttaaggaaatggagtccattgatcaatatattgagagaaaaaagaaacattttgaagaacacaattccatgaatgaactgaagcagcccatcaataagggaggggtcaggactccagtacctccaagaggaagactctctgtggcttctactcccatcagccaacgacgctcgcaaggccggtcttgtggccctgcaagtcagagtaccttgggtctgaaggggtcactcaagcgctctgctatctctgcagctaaaacgggtgtcaggttttcagctgctactaaagataatgagcataagcgttcactgaccaagactccagccagaaagtctgcacatgtgaccgtgtctgggggcaccccaaaaggcgaggctgtgcttgggacacacaaattaaagaccatcacggggaattctgctgctgttattaccccattcaagttgacaactgaggcaacgcagactccagtctccaataagaaaccagtgtttgatcttaaagcaagtttgtctcgtcccctcaactatgaaccacacaaaggaaagctaaaaccatgggggcaatctaaagaaaataattatctaaatcaacatgtcaacagaattaacttctacaagaaaacttacaaacaaccccatctccagacaaaggaagagcaacggaagaaacgcgagcaagaacgaaaggagaagaaagcaaaggttttgggaatgcgaaggggcctcattttggctgaagattaataattttttaacatcttgtaaatattcctgtattctcaacttttttccttttgtaaattttttttttttgctgtcatccccactttagtcacgagatctttttctgctaactgttcatagtctgtgtagtgtccatgggttcttcatgtgctatgatctctgaaaagacgttatcaccttaaagctcaaattctttgggatggtttttacttaagtccattaacaattcaggtttctaacgagacccatcctaaaattctgtttctagatttttaatgtcaagttcccaagttccccctgctggttctaatattaacagaactgcagtcttctgctagccaatagcatttacctgatggcagctagttatgcaagcttcaggagaatttgaacaataacaagaatagggtaagctgggatagaaaggccacctcttcactctctatagaatatagtaacctttatgaaacggggccatatagtttggttatgacatcaatattttacctaggtgaaattgtttaggcttatgtaccttcgttcaaatatcctcatgtaattgccatctgtcactcactatattcacaaaaataaaactctacaactcattctaacattgcttacttaaaagctacatagccctatcgaaatgcgaggattaatgctttaatgcttttagagacagggtctcactgtgttgcccaggctggtctcaaactccaccaaatgtacttcttattcattttatggaaaagactaggctttgcttagtatcatgtccatgtttccttcacctcagtggagcttctgagttttatactgctcaagatcgtcataaataaaattttttctcattgtcataaaaaaaaaaaaaa

SEQ ID NO: 277 - DNA, 6948 bp, Homo sapiens; identical to SEQ ID NO: 118

SEQ ID NO: 278 - DNA, 6902 bp, Homo sapiens
ccaagtacctagggtggtggccgagtcccgcctcccgccagcgggggcgaggacctgcgacgcgcacccctgcctggcccggtctcctcagcaccagccccacgcacaccctacttcctcagcttctcgccctcaccctgccaacttccctgcgaggagggacctgccgccagcctgcttcctcgtccgcaggccctgcgctgaacgctgccgcgcccagggttcaccttgcgccgtcgggaaagcccatgaactctccagaaacggcgtaaaggagggtcccgccgcggcgcagggctggggcgcctgggttccccctgggtggagcagcggcagcagagcgggaaagtggtggaggatgatcttgcggccaaaggggacctcggcgcagtaatgtcaacatgatgtttcgctcagatcgaatgtggagctgccattggaaatggaagcccagtcctctcctgttcttatttgctttatatatcatgtgtgttcctcactcagtgtggggatgtgccaactgccgagtggttttgtccaacccttctgggacctttacttctccatgctaccctaacgactacccaaacagccaggcttgcatgtggacgctccgagcccccaccggttatatcattcagataacatttaacgactttgacattgaagaagctcccaattgcatttatgactcattatcccttgataatggagagagccagactaaattttgtggagcaactgccaaaggcctatcatttaactcaagtgcgaatgagatgcatgtgtccttttcaagtgactttagcatccagaagaaaggtttcaatgccagctacatcagagttgccgtgtccttaaggaatcaaaaggtcattttaccccagacatcagatgcttaccaggtatctgttgcaaaaagcatctctattccagagctcagtgctttcacactctgctttgaagcaaccaaagttggccatgaagacagtgattggacagctttctcctactcaaatgcatccttcacacaattgctcagttttggaaaggccaagagtggctactttctatccatttctgattcaaaatgtttgttgaataatgcattacctgtcaaagaaaaagaagacatttttgcagaaagctttgaacagctctgccttgtttggaataattctttgggctctattggtgtaaatttcaaaagaaactatgaaacagttccatgtgattctaccattagtaaagttattcctgggaatgggaaattgttgttgggctccaatcaaaatgaaattgtctctctaaaaggggacatttataactttcgactttggaattttaccatgaatgccaaaatcctctccaacctcagctgtaatgtgaaagggaatgtagtcgactggcaaaatgacttctggaatatcccaaacctagctctgaaagctgaaagcaacctaagctgtggttcctacctgatcccgctcccagcagcagaactggccagctgtgcagacctggggaccctctgtcaagctactgtaaactctcctagtactacaccacccactgtcaccactaacatgcctgttactaacagaatcgataaacaaaggaatgatggaattatctatagaatatccgtagtgattcagaacatccttcgtcaccctgaggtaaaagtacagagcaaggtggcagaatggctcaattcaaccttccaaaattggaactacacggtttatgtcgttaatatcagttttcacctgagtgctggagaggacaagattaaagtcaagagaagccttgaggatgagccaaggttggtgctttgggcccttctagtttacaatgctaccaacaatactaatttagaaggaaaaatcattcagcagaagctcctaaaaaataatgagtccttggatgaaggcttgaggctacatacagtgaatgtgagacaactgggtcattgtcttgccatggaggaacccaaaggctactactggccatctatccaaccttctgaatacgttcttccttgtccagacaagcctggcttttctgcttctcggatatgtttttacaatgctaccaacccattggtaacctactggggacctgttgatatctccaactgtttaaaagaagcaaatgaagttgctaaccagattttaaatttaactgctgatgggcagaacttaacctcagccaatattaccaacattgtggaacaggtcaaaagaattgtgaataaagaagaaaacattgatataacacttggctcaactctaatgaatatattttctaatatcttaagcagttcagacagtgacttgcttgagtcatcttctgaagctttaaaaacaattgatgaattggccttcaagatagacctaaatagcacatcacatgtgaatattacaactcggaacttggctctcagcgtatcatccctgttaccagggacaaatgcaatttcaaattttagcattggtcttccaagcaataatgaatcgtatttccagatggattttgagagtggacaagtggatccactggcatctgtaattttgcctccaaacttacttgagaatttaagtccagaagattctgtattagttagaagagcacagtttactttcttcaacaaaactggacttttccaggatgtaggaccccaaagaaaaactttagtgagttatgtgatggcgtgcagtattggaaacattactatccagaatctgaaggatcctgttcaaataaaaatcaaacatacaagaactcaggaagtgcatcatcccatctgtgccttctgggatctgaacaaaaacaaaagttttggaggatggaacacgtcaggatgtgttgcacacagagattcagatgcaagtgagacagtctgcctgtgtaaccacttcacacactttggagttctgatggaccttccaagaagtgcctcacagttagatgcaagaaacactaaagtcctcactttcatcagctatattgggtgtggaatatctgctattttttcagcagcaactctcctgacatatgttgcttttgagaaattgcgaagggattatccctccaaaatcttgatgaacctgagcacagccctgctgttcctgaatctcctcttcctcctagatggctggatcacctccttcaatgtggatggactttgcattgctgttgcagtcctgttgcatttcttccttctggcaacctttacctggatggggctagaagcaattcacatgtacattgctctagttaaagtatttaacacttacattcgccgatacattctaaaattctgcatcattggctggggtttgcctgccttagtggtgtcagttgttctagcgagcagaaacaacaatgaagtctatggaaaagaaagttatgggaaagaaaaaggtgatgaattctgttggattcaagatccagtcatattttatgtgacctgtgctgggtattttggagtcatgttttttctgaacattgccatgttcattgtggtaatggtgcagatctgtgggaggaatggcaagagaagcaaccggaccctgagagaagaagtgttaaggaacctgcgcagtgtggttagcttgacctttctgttgggcatgacatggggttttgcattctttgcctggggacccttaaatatccccttcatgtacctcttctccatcttcaattcattacaaggcttatttatattcatcttccactgtgctatgaaggagaatgttcagaaacagtggcggcggcatctctgctgtggtagatttcggttagcagataactcagattggagtaagacagctaccaatatcatcaagaaaagttctgataatctaggaaaatctttgtcttcaagctccattggttccaactcaacctatcttacatccaaatctaaatccagctctaccacctatttcaaaaggaatagccacacagacagtgcttccatggacaagtccttgtcaaaactggcccatgctgatggagatcaaacatcaatcatccctgtccatcaggtcattgataaggtcaagggttattgcaatgctcattcagacaacttctataaaaatattatcatgtcagacaccttcagccacagcacaaagttttaatgtctttaagaaaaagaaatcaatctgcagaaatgtgaagatttgcaagcagtgtaaactgcaactagtgatgtaaatgtgctattacctaggtaactgcatatatataaggaatgtattttgttaagaaggcttttgtgaaattcagaatttttctttttaatatatttcttccatggaagagttgtcatcactaaaacttcagtactgagagtaacatgactcagtagccacagaagctatgatttgtaaaatatataattgaatcagagtaatcataatgcaggggagacattcaaattagagacaagggagaagcaatgctgaggaagaccctagatagagctcattttactccacctaatcgttatatctggatatacccattttctgcatcttctttctcaacaataaaaaatgtaactattttgaatgcccacaaatcccattccagtgttactttctgtgaatgcagtaccatattctcattttcaatgacatttcaaccacaggcagaaaagactgtttactccttgacccaaagattaaaaaggattttttattattttaaatattacaccttcagaaccataacatgcttaagaaaactttcccaaaatgttgacctagttaaatgaggctatataaatttctaatattttacttattctattcaaggcatagggccaaagcattaagtataatttaatcccatacattcgagttaagtttagtgttgatgttccatcattctggacctcccaggagttgtttaagaatgaatctcttacacctctacttttgcccctctactgtatattaagcccataggcttgtgggaggaaggagaatttccattaggcaagctgtatgcagtggaattttccttttaggagacacacaattaagactctctggttctgtccttgctttggagactttaagacatttcctaaagcacaaataaaagcctcgtatttccccattgagagttttgttccaaggaatatgaagtgagacatatgggtgagtcataataatcaaaataatttatgaagagctgggtctgcaatagctagtctaaaaactacttgtgtgtcagtcctctggttatagtatataagagcctgaggaggtctggcaagatagatggtgtattatttatggatcaggctgctgcatacaaaccttgcatactattatgcagcttacctaactctcagactattctgagtaatgcttgcttgctaatgaatgtataggagaccacattgtaattgttcttagatgatggagtccatgcagtttcttagaaatcggtctcagtgcatgctgtgctttttcacatttgctctgggttatctgggaagtatcaggttctgggaggcaacagcattaagtgataagaaaaggagacattctggcaaagccaatctgcttaaaggcaaagtccagaacctggaacctagaggcctttctctctgcacgaaaaacaggtagtttgcagtctgagatatgggagagcttttaggctacacagcaacccaagggacctctcaccttttgctgagcttcaatcaggaagctatttgcctggctccagcagatgatgagataatgaggtagtgggttttttattactgttccattttgcaacatcctgcaacaccatcctgggagacaagagcattacccagcttggctttcacgggggagggttgtattcagtaaaaaagaatagtaaatataaggtcactgagattctaagtaagatagtaaatctaaggtcactgagccaaatccttttcaataggcatatattaacaggctgcttattttggcggaggttacatatggatgaaaatgaatcttagtcactgaatattcatatacatttcccccaaaaccttagacattcatagtagattttaattagttagctttctaactagtcagatttctgcccaaagtgcttagtcaatagtaattaagatataggtaattaagatatagcttcaaaaatggctttgcttttgatttctactcatattcgtatggctccagaaaaatatttttttcatatttgacaatgtcagctccactttagaaattttcaataaccagatgagaaaaaaattaagaaattgctcaagggaaacatttgtaaatggatttgaaagattgagccaaattctgttgtcagttctaagcatgcagttctcacctccatttagtcccccatcagaacagaggtcaggaatttagctggggagcctaaatttagttcagcttacctttgagaatagcatcaattcagactctcttttcattatgttttcttttctttttccctctttttaaactacattgtgttagagtcatagtctaggatcctgagagattttccattcttgtcaccattcacttgcattgtaaagattttctttgtctgttgttggcatagattcttttgtacatatttatttatttgtgtttatatatgtcaattggtttcctttcttagcttgatattgcctagctttgttgttttaattaactttctattagagagactgtatatattttttctaaatactttgtgaaatcatttttggtagcaatatctttgaatatgatgaataaaagtgactgtgagtgcaaatagaattagcagtaagaagctactctagctaatttgccattttacttaaatggaaaatgtttttcaaataaatacttatgttgttc

SEQ ID NO: 279 - DNA, 6864 bp, Homo sapiens
ccaagtacctagggtggtggccgagtcccgcctcccgccagcgggggcgaggacctgcgacgcgcacccctgcctggcccggtctcctcagcaccagccccacgcacaccctacttcctcagcttctcgccctcaccctgccaacttccctgcgaggagggacctgccgccagcctgcttcctcgtccgcaggccctgcgctgaacgctgccgcgcccagggttcaccttgcgccgtcgggaaagcccatgaactctccagaaacggcgtaaaggagggtcccgccgcggcgcagggctggggcgcctgggttccccctgggtggagcagcggcagcagagcgggaaagtggtggaggatgatcttgcggccaaaggggacctcggcgcagtaatgtcaacatgatgtttcgctcagatcgaatgtggagctgccattggaaatggaagcccagtcctctcctgttcttatttgctttatatatcatgtgtgttcctcactcagtgtggggatgtgccaactgccgagtggttttgtccaacccttctgggacctttacttctccatgctaccctaacgactacccaaacagccaggcttgcatgtggacgctccgagcccccaccggttatatcattcagataacatttaacgactttgacattgaagaagctcccaattgcatttatgactcattatcccttgataatggagagagccagactaaattttgtggagcaactgccaaaggcctatcatttaactcaagtgcgaatgagatgcatgtgtccttttcaagtgactttagcatccagaagaaaggtttcaatgccagctacatcagagttgccgtgtccttaaggaatcaaaaggtcattttaccccagacatcagatgcttaccaggtatctgttgcaaaaagcatctctattccagagctcagtgctttcacactctgctttgaagcaaccaaagttggccatgaagacagtgattggacagctttctcctactcaaatgcatccttcacacaattgctcagttttggaaaggccaagagtggctactttctatccatttctgattcaaaatgtttgttgaataatgcattacctgtcaaagaaaaagaagacatttttgcagaaagctttgaacagctctgccttgtttggaataattctttgggctctattggtgtaaatttcaaaagaaactatgaaacagttccatgtgattctaccattagtaaagttattcctgggaatgggaaattgttgttgggctccaatcaaaatgaaattgtctctctaaaaggggacatttataactttcgactttggaattttaccatgaatgccaaaatcctctccaacctcagctgtaatgtgaaagggaatgtagtcgactggcaaaatgacttctggaatatcccaaacctagctctgaaagctgaaagcaacctaagctgtggttcctacctgatcccgctcccagcagcagaactggccagctgtgcagacctggggaccctctgtcaagatggaattatctatagaatatccgtagtgattcagaacatccttcgtcaccctgaggtaaaagtacagagcaaggtggcagaatggctcaattcaaccttccaaaattggaactacacggtttatgtcgttaatatcagttttcacctgagtgctggagaggacaagattaaagtcaagagaagccttgaggatgagccaaggttggtgctttgggcccttctagtttacaatgctaccaacaatactaatttagaaggaaaaatcattcagcagaagctcctaaaaaataatgagtccttggatgaaggcttgaggctacatacagtgaatgtgagacaactgggtcattgtcttgccatggaggaacccaaaggctactactggccatctatccaaccttctgaatacgttcttccttgtccagacaagcctggcttttctgcttctcggatatgtttttacaatgctaccaacccattggtaacctactggggacctgttgatatctccaactgtttaaaagaagcaaatgaagttgctaaccagattttaaatttaactgctgatgggcagaacttaacctcagccaatattaccaacattgtggaacaggtcaaaagaattgtgaataaagaagaaaacattgatataacacttggctcaactctaatgaatatattttctaatatcttaagcagttcagacagtgacttgcttgagtcatcttctgaagctttaaaaacaattgatgaattggccttcaagatagacctaaatagcacatcacatgtgaatattacaactcggaacttggctctcagcgtatcatccctgttaccagggacaaatgcaatttcaaattttagcattggtcttccaagcaataatgaatcgtatttccagatggattttgagagtggacaagtggatccactggcatctgtaattttgcctccaaacttacttgagaatttaagtccagaagattctgtattagttagaagagcacagtttactttcttcaacaaaactggacttttccaggatgtaggaccccaaagaaaaactttagtgagttatgtgatggcgtgcagtattggaaacattactatccagaatctgaaggatcctgttcaaataaaaatcaaacatacaagaactcaggaagtgcatcatcccatctgtgccttctgggatctgaacaaaaacaaaagttttggaggatggaacacgtcaggatgtgttgcacacagagattcagatgcaagtgagacagtctgcctgtgtaaccacttcacacactttggagttctgatggaccttccaagaagtgcctcacagttagatgcaagaaacactaaagtcctcactttcatcagctatattgggtgtggaatatctgctattttttcagcagcaactctcctgacatatgttgcttttgagaaattgcgaagggattatccctccaaaatcttgatgaacctgagcacagccctgctgttcctgaatctcctcttcctcctagatggctggatcacctccttcaatgtggatggactttgcattgctgttgcagtcctgttgcatttcttccttctggcaacctttacctggatggggctagaagcaattcacatgtacattgctctagttaaagtatttaacacttacattcgccgatacattctaaaattctgcatcattggctggggtttgcctgccttagtggtgtcagttgttctagcgagcagaaacaacaatgaagtctatggaaaagaaagttatgggaaagaaaaaggtgatgaattctgttggattcaagatccagtcatattttatgtgacctgtgctgggtattttggagtcatgttttttctgaacattgccatgttcattgtggtaatggtgcagatctgtgggaggaatggcaagagaagcaaccggaccctgagagaagaagtgttaaggaacctgcgcagtgtggttagcttgacctttctgttgggcatgacatggggttttgcattctttgcctggggacccttaaatatccccttcatgtacctcttctccatcttcaattcattacaaggcttatttatattcatcttccactgtgctatgaaggagaatgttcagaaacagtggcggcggcatctctgctgtggtagatttcggttagcagataactcagattggagtaagacagctaccaatatcatcaagaaaagttctgataatctaggaaaatctttgtcttcaagctccattggttccaactcaacctatcttacatccaaatctaaatccagctctaccacctatttcaaaaggaatagccacacagataatgtctcctatgagcattccttcaacaaaagtggatcactcagacagtgcttccatggacaagtccttgtcaaaactggcccatgctgatggagatcaaacatcaatcatccctgtccatcaggtcattgataaggtcaagggttattgcaatgctcattcagacaacttctataaaaatattatcatgtcagacaccttcagccacagcacaaagttttaatgtctttaagaaaaagaaatcaatctgcagaaatgtgaagatttgcaagcagtgtaaactgcaactagtgatgtaaatgtgctattacctaggtaactgcatatatataaggaatgtattttgttaagaaggcttttgtgaaattcagaatttttctttttaatatatttcttccatggaagagttgtcatcactaaaacttcagtactgagagtaacatgactcagtagccacagaagctatgatttgtaaaatatataattgaatcagagtaatcataatgcaggggagacattcaaattagagacaagggagaagcaatgctgaggaagaccctagatagagctcattttactccacctaatcgttatatctggatatacccattttctgcatcttctttctcaacaataaaaaatgtaactattttgaatgcccacaaatcccattccagtgttactttctgtgaatgcagtaccatattctcattttcaatgacatttcaaccacaggcagaaaagactgtttactccttgacccaaagattaaaaaggattttttattattttaaatattacaccttcagaaccataacatgcttaagaaaactttcccaaaatgttgacctagttaaatgaggctatataaatttctaatattttacttattctattcaaggcatagggccaaagcattaagtataatttaatcccatacattcgagttaagtttagtgttgatgttccatcattctggacctcccaggagttgtttaagaatgaatctcttacacctctacttttgcccctctactgtatattaagcccataggcttgtgggaggaaggagaatttccattaggcaagctgtatgcagtggaattttccttttaggagacacacaattaagactctctggttctgtccttgctttggagactttaagacatttcctaaagcacaaataaaagcctcgtatttccccattgagagttttgttccaaggaatatgaagtgagacatatgggtgagtcataataatcaaaataatttatgaagagctgggtctgcaatagctagtctaaaaactacttgtgtgtcagtcctctggttatagtatataagagcctgaggaggtctggcaagatagatggtgtattatttatggatcaggctgctgcatacaaaccttgcatactattatgcagcttacctaactctcagactattctgagtaatgcttgcttgctaatgaatgtataggagaccacattgtaattgttcttagatgatggagtccatgcagtttcttagaaatcggtctcagtgcatgctgtgctttttcacatttgctctgggttatctgggaagtatcaggttctgggaggcaacagcattaagtgataagaaaaggagacattctggcaaagccaatctgcttaaaggcaaagtccagaacctggaacctagaggcctttctctctgcacgaaaaacaggtagtttgcagtctgagatatgggagagcttttaggctacacagcaacccaagggacctctcaccttttgctgagcttcaatcaggaagctatttgcctggctccagcagatgatgagataatgaggtagtgggttttttattactgttccattttgcaacatcctgcaacaccatcctgggagacaagagcattacccagcttggctttcacgggggagggttgtattcagtaaaaaagaatagtaaatataaggtcactgagattctaagtaagatagtaaatctaaggtcactgagccaaatccttttcaataggcatatattaacaggctgcttattttggcggaggttacatatggatgaaaatgaatcttagtcactgaatattcatatacatttcccccaaaaccttagacattcatagtagattttaattagttagctttctaactagtcagatttctgcccaaagtgcttagtcaatagtaattaagatataggtaattaagatatagcttcaaaaatggctttgcttttgatttctactcatattcgtatggctccagaaaaatatttttttcatatttgacaatgtcagctccactttagaaattttcaataaccagatgagaaaaaaattaagaaattgctcaagggaaacatttgtaaatggatttgaaagattgagccaaattctgttgtcagttctaagcatgcagttctcacctccatttagtcccccatcagaacagaggtcaggaatttagctggggagcctaaatttagttcagcttacctttgagaatagcatcaattcagactctcttttcattatgttttcttttctttttccctctttttaaactacattgtgttagagtcatagtctaggatcctgagagattttccattcttgtcaccattcacttgcattgtaaagattttctttgtctgttgttggcatagattcttttgtacatatttatttatttgtgtttatatatgtcaattggtttcctttcttagcttgatattgcctagctttgttgttttaattaactttctattagagagactgtatatattttttctaaatactttgtgaaatcatttttggtagcaatatctttgaatatgatgaataaaagtgactgtgagtgcaaatagaattagcagtaagaagctactctagctaatttgccattttacttaaatggaaaatgtttttcaaataaatacttatgttgttc

SEQ ID NO: 280 - DNA, 6818 bp, Homo sapiens
ccaagtacctagggtggtggccgagtcccgcctcccgccagcgggggcgaggacctgcgacgcgcacccctgcctggcccggtctcctcagcaccagccccacgcacaccctacttcctcagcttctcgccctcaccctgccaacttccctgcgaggagggacctgccgccagcctgcttcctcgtccgcaggccctgcgctgaacgctgccgcgcccagggttcaccttgcgccgtcgggaaagcccatgaactctccagaaacggcgtaaaggagggtcccgccgcggcgcagggctggggcgcctgggttccccctgggtggagcagcggcagcagagcgggaaagtggtggaggatgatcttgcggccaaaggggacctcggcgcagtaatgtcaacatgatgtttcgctcagatcgaatgtggagctgccattggaaatggaagcccagtcctctcctgttcttatttgctttatatatcatgtgtgttcctcactcagtgtggggatgtgccaactgccgagtggttttgtccaacccttctgggacctttacttctccatgctaccctaacgactacccaaacagccaggcttgcatgtggacgctccgagcccccaccggttatatcattcagataacatttaacgactttgacattgaagaagctcccaattgcatttatgactcattatcccttgataatggagagagccagactaaattttgtggagcaactgccaaaggcctatcatttaactcaagtgcgaatgagatgcatgtgtccttttcaagtgactttagcatccagaagaaaggtttcaatgccagctacatcagagttgccgtgtccttaaggaatcaaaaggtcattttaccccagacatcagatgcttaccaggtatctgttgcaaaaagcatctctattccagagctcagtgctttcacactctgctttgaagcaaccaaagttggccatgaagacagtgattggacagctttctcctactcaaatgcatccttcacacaattgctcagttttggaaaggccaagagtggctactttctatccatttctgattcaaaatgtttgttgaataatgcattacctgtcaaagaaaaagaagacatttttgcagaaagctttgaacagctctgccttgtttggaataattctttgggctctattggtgtaaatttcaaaagaaactatgaaacagttccatgtgattctaccattagtaaagttattcctgggaatgggaaattgttgttgggctccaatcaaaatgaaattgtctctctaaaaggggacatttataactttcgactttggaattttaccatgaatgccaaaatcctctccaacctcagctgtaatgtgaaagggaatgtagtcgactggcaaaatgacttctggaatatcccaaacctagctctgaaagctgaaagcaacctaagctgtggttcctacctgatcccgctcccagcagcagaactggccagctgtgcagacctggggaccctctgtcaagatggaattatctatagaatatccgtagtgattcagaacatccttcgtcaccctgaggtaaaagtacagagcaaggtggcagaatggctcaattcaaccttccaaaattggaactacacggtttatgtcgttaatatcagttttcacctgagtgctggagaggacaagattaaagtcaagagaagccttgaggatgagccaaggttggtgctttgggcccttctagtttacaatgctaccaacaatactaatttagaaggaaaaatcattcagcagaagctcctaaaaaataatgagtccttggatgaaggcttgaggctacatacagtgaatgtgagacaactgggtcattgtcttgccatggaggaacccaaaggctactactggccatctatccaaccttctgaatacgttcttccttgtccagacaagcctggcttttctgcttctcggatatgtttttacaatgctaccaacccattggtaacctactggggacctgttgatatctccaactgtttaaaagaagcaaatgaagttgctaaccagattttaaatttaactgctgatgggcagaacttaacctcagccaatattaccaacattgtggaacaggtcaaaagaattgtgaataaagaagaaaacattgatataacacttggctcaactctaatgaatatattttctaatatcttaagcagttcagacagtgacttgcttgagtcatcttctgaagctttaaaaacaattgatgaattggccttcaagatagacctaaatagcacatcacatgtgaatattacaactcggaacttggctctcagcgtatcatccctgttaccagggacaaatgcaatttcaaattttagcattggtcttccaagcaataatgaatcgtatttccagatggattttgagagtggacaagtggatccactggcatctgtaattttgcctccaaacttacttgagaatttaagtccagaagattctgtattagttagaagagcacagtttactttcttcaacaaaactggacttttccaggatgtaggaccccaaagaaaaactttagtgagttatgtgatggcgtgcagtattggaaacattactatccagaatctgaaggatcctgttcaaataaaaatcaaacatacaagaactcaggaagtgcatcatcccatctgtgccttctgggatctgaacaaaaacaaaagttttggaggatggaacacgtcaggatgtgttgcacacagagattcagatgcaagtgagacagtctgcctgtgtaaccacttcacacactttggagttctgatggaccttccaagaagtgcctcacagttagatgcaagaaacactaaagtcctcactttcatcagctatattgggtgtggaatatctgctattttttcagcagcaactctcctgacatatgttgcttttgagaaattgcgaagggattatccctccaaaatcttgatgaacctgagcacagccctgctgttcctgaatctcctcttcctcctagatggctggatcacctccttcaatgtggatggactttgcattgctgttgcagtcctgttgcatttcttccttctggcaacctttacctggatggggctagaagcaattcacatgtacattgctctagttaaagtatttaacacttacattcgccgatacattctaaaattctgcatcattggctggggtttgcctgccttagtggtgtcagttgttctagcgagcagaaacaacaatgaagtctatggaaaagaaagttatgggaaagaaaaaggtgatgaattctgttggattcaagatccagtcatattttatgtgacctgtgctgggtattttggagtcatgttttttctgaacattgccatgttcattgtggtaatggtgcagatctgtgggaggaatggcaagagaagcaaccggaccctgagagaagaagtgttaaggaacctgcgcagtgtggttagcttgacctttctgttgggcatgacatggggttttgcattctttgcctggggacccttaaatatccccttcatgtacctcttctccatcttcaattcattacaaggcttatttatattcatcttccactgtgctatgaaggagaatgttcagaaacagtggcggcggcatctctgctgtggtagatttcggttagcagataactcagattggagtaagacagctaccaatatcatcaagaaaagttctgataatctaggaaaatctttgtcttcaagctccattggttccaactcaacctatcttacatccaaatctaaatccagctctaccacctatttcaaaaggaatagccacacagacagtgcttccatggacaagtccttgtcaaaactggcccatgctgatggagatcaaacatcaatcatccctgtccatcaggtcattgataaggtcaagggttattgcaatgctcattcagacaacttctataaaaatattatcatgtcagacaccttcagccacagcacaaagttttaatgtctttaagaaaaagaaatcaatctgcagaaatgtgaagatttgcaagcagtgtaaactgcaactagtgatgtaaatgtgctattacctaggtaactgcatatatataaggaatgtattttgttaagaaggcttttgtgaaattcagaatttttctttttaatatatttcttccatggaagagttgtcatcactaaaacttcagtactgagagtaacatgactcagtagccacagaagctatgatttgtaaaatatataattgaatcagagtaatcataatgcaggggagacattcaaattagagacaagggagaagcaatgctgaggaagaccctagatagagctcattttactccacctaatcgttatatctggatatacccattttctgcatcttctttctcaacaataaaaaatgtaactattttgaatgcccacaaatcccattccagtgttactttctgtgaatgcagtaccatattctcattttcaatgacatttcaaccacaggcagaaaagactgtttactccttgacccaaagattaaaaaggattttttattattttaaatattacaccttcagaaccataacatgcttaagaaaactttcccaaaatgttgacctagttaaatgaggctatataaatttctaatattttacttattctattcaaggcatagggccaaagcattaagtataatttaatcccatacattcgagttaagtttagtgttgatgttccatcattctggacctcccaggagttgtttaagaatgaatctcttacacctctacttttgcccctctactgtatattaagcccataggcttgtgggaggaaggagaatttccattaggcaagctgtatgcagtggaattttccttttaggagacacacaattaagactctctggttctgtccttgctttggagactttaagacatttcctaaagcacaaataaaagcctcgtatttccccattgagagttttgttccaaggaatatgaagtgagacatatgggtgagtcataataatcaaaataatttatgaagagctgggtctgcaatagctagtctaaaaactacttgtgtgtcagtcctctggttatagtatataagagcctgaggaggtctggcaagatagatggtgtattatttatggatcaggctgctgcatacaaaccttgcatactattatgcagcttacctaactctcagactattctgagtaatgcttgcttgctaatgaatgtataggagaccacattgtaattgttcttagatgatggagtccatgcagtttcttagaaatcggtctcagtgcatgctgtgctttttcacatttgctctgggttatctgggaagtatcaggttctgggaggcaacagcattaagtgataagaaaaggagacattctggcaaagccaatctgcttaaaggcaaagtccagaacctggaacctagaggcctttctctctgcacgaaaaacaggtagtttgcagtctgagatatgggagagcttttaggctacacagcaacccaagggacctctcaccttttgctgagcttcaatcaggaagctatttgcctggctccagcagatgatgagataatgaggtagtgggttttttattactgttccattttgcaacatcctgcaacaccatcctgggagacaagagcattacccagcttggctttcacgggggagggttgtattcagtaaaaaagaatagtaaatataaggtcactgagattctaagtaagatagtaaatctaaggtcactgagccaaatccttttcaataggcatatattaacaggctgcttattttggcggaggttacatatggatgaaaatgaatcttagtcactgaatattcatatacatttcccccaaaaccttagacattcatagtagattttaattagttagctttctaactagtcagatttctgcccaaagtgcttagtcaatagtaattaagatataggtaattaagatatagcttcaaaaatggctttgcttttgatttctactcatattcgtatggctccagaaaaatatttttttcatatttgacaatgtcagctccactttagaaattttcaataaccagatgagaaaaaaattaagaaattgctcaagggaaacatttgtaaatggatttgaaagattgagccaaattctgttgtcagttctaagcatgcagttctcacctccatttagtcccccatcagaacagaggtcaggaatttagctggggagcctaaatttagttcagcttacctttgagaatagcatcaattcagactctcttttcattatgttttcttttctttttccctctttttaaactacattgtgttagagtcatagtctaggatcctgagagattttccattcttgtcaccattcacttgcattgtaaagattttctttgtctgttgttggcatagattcttttgtacatatttatttatttgtgtttatatatgtcaattggtttcctttcttagcttgatattgcctagctttgttgttttaattaactttctattagagagactgtatatattttttctaaatactttgtgaaatcatttttggtagcaatatctttgaatatgatgaataaaagtgactgtgagtgcaaatagaattagcagtaagaagctactctagctaatttgccattttacttaaatggaaaatgtttttcaaataaatacttatgttgttc

SEQ ID NO: 281 - DNA, 392 bp, Homo sapiens
tttttttttttttttttgagttgctgaaaagtttacttttgagttttaaactgtactttgaaaactatattgtgaactgtgttgacatgaggaaaggctgggctccctgaaaacatccagttccacagcagggcgggcccaagcccagccaatccccaggcaatgcagggcagggatcccacctggtataagtacgggcagagggcagagccaggctgtatcgaggggcggcgctgggaccctcctcgcccagaattcctactcatccccagcacagaagtgctctgtagggccagctgaggacaccccggttcactgagggtggcccacagtaagtcgccgtctggcagtaagttagctctgcaggtgtggaccccaagaccacacacggc

SEQ ID NO: 282 - DNA, 472 bp, Homo sapiens
ttaacacaaaagcttttacttggaaactggcaaatactggactagaatactgacatgctcacgctctggcgggagctcggatgcagaagctattgcacaaagcccctctgattgccttgctcctctttggcatgtatcagcagagccccaagggccaattgcccacaggtggggactgttctccatcaaggtatggggacccctacttccttgttttgttaaaaagtgcaggtaggcgaagaaagcccaggcagttgacccagtctttgaaacagctgactccccagagctggggccaggggagcctggtcttgaggggtaagggctgcagggccaggctgatggcctgtgtcatggcattggccatctcctctccagcttctcctcagccatcgcccgtccgtcatggtggtgtcggctgcacctggaccttcctgcctctccgctcagggcagcagcagtgagtgcagca

SEQ ID NO: 283 - DNA, 439 bp, Homo sapiens
ttgcaatttataaatacggtttattaccatggttacaaactttcagaacaggcctctgagacattggactgagactctgccgaacagcttttggcatcggtgtcctttttcttctgtcgcggaaggcagccccggactgcaaggcctccagcagattatccatcactcctgtctcatcaccctcagtcttcatttctaataaacgctttttcttttgttggcgttcgagtctttctcgctctgctaattctttagctattctgacacgtttttctttttcctctgcttctctttttttgatattctcctttattgcttgcatgaatgtggttctgaagttattcaggtcagtaagaaagtcttccacagacaccttcttcacatcaatggcatagtatcctattatactctggtataacttttccatgttttcgtgtaa

SEQ ID NO: 284 - DNA, 525 bp, Homo sapiens
ttttgaatttttgaaaagcaacagtgttttattactggaaagtgttacagacagatattgtgaaatttttccttgggcttctttcaatttcgttcaattctcgtccagtattctcataacatttggatcaggtactttatcaccttgtagtgtcactgttcctttctgtatcctctcgaagcctcctgttactcgttttctaattctcttccagcccactgcacgatctagtgtcgaatggatgaaacagctgagcagaacagttctttagctgtcggcctaaatgaccaacttcatgacctctcaaggtctcgctccccggctgcacgcagctcagcttccaacattcgggaaaggcgtgccggatcgcgaggggccgctgggaccgagtcccggacgtcgcgacgcgcagggggctgctcggccggcggtctcgggaaaagtgaggggacgaggcgcccaagcaacgtgggtttcgggaactgtgagtattcactttgcgtagagcgcctcggccctcgtgcc

SEQ ID NO: 285 - DNA, 575 bp, Homo sapiens
tttttttttttttttttttcttgtccaagatcatttattgttattattatttttctctcttaattggattcagcgtttctggctcctcacacacatcctctctggtgggggattcaggtttgtgcaaagccagaggagcttgtacccacctgggcccccggcagcagcacggccggctttgatcggagcccctcttccctgtccgggctcgcctgccccagtccctgcttctgacccctgagtccggcctcccgagcctctgcctgcaccctgagcatccccaggacggctgggagggccaggtcttccgtgatgcagaagtgcctgagatggttcatgaaatgccctcattgttccccttctgctaaggcccccgacgcctccctcctgctgtcctacacagggcccttgctgggtcacacaccaaacagccctcaaggaaaaatttagcagttgaaccgtgggggaggcctggggttaagcccggagtctccttggcccgttcaggccgtcaatgaccaaacgctagggctgacgaaacggtccgacctttggactaacactttggatgcctc

SEQ ID NO: 286 - DNA, 496 bp, Homo sapiens
ttttttgtatttttctcaatataatgttgcaagatgtcattatattctcattacccataacttcccatccaaatcttaatggcacatttgatattttttcaaatggctttgagatataattcacataccacacaattcatgtatctaaagtatacagttctgtagttctgtggttgttggttacatccaccagactgagggctccctgagggttggtgcctcagctttcccttcacttactcattcaccaaacattcagcgcctactgagtactggggttatgatggccaacaggagagacagtctctgcctactgtttggtgggggtggagtacttagtaaccgtcgtcattattgagtgcttacctgtgctgggcacagtgctgctactgggtgactgtgtccccagggctgtcccaggctgggggtctggaggagtagttatcagttgaactgagttaatccacagtggaaggtaacccactccctgccctag

SEQ ID NO: 287 - DNA, 426 bp, Homo sapiens
tttttttttttttttttttttctatacagaattggtcagctgtttttattcttcagtttatcatcttatatttggctctcaatttcacccataaattattgatggcttattataccccaagtcccctgcgctccgctttttggggtatccctcttcggagcgagaagtcacttaaaattttaccccatcttccccacttgggaatcggaagggttcatagctaagttttgttatttataagcacgccggctcttctttatccctttctccaccaaccccatttcaaggttggtccctcccagcggacgacagtgatgaattccttttggggacagccctcccgcaactaacgggggctccatcgacgctctggtctccttgctgctcgctgggaattcgggtgggacgttttccaaagtttggatt

SEQ ID NO: 288 - DNA, 566 bp, Homo sapiens
tagaacaaacattttattattaaaataaacttttgtataaaagcattacagatcaaaagctgtatttacacttatcgattcaaggtccaattatgcatcaaacattgaatggcacagcaatggtttacatatgcaagtaaattggacatacaaacacttagattccacctctaccaaataccttgattaatgcaaagaggagggggaatactgacacaggaaacctgcccagaaactagactggcagagatgtcaggttaacaaactgctaaaagttacatctccaaaaaggcacttatcattgttataaaagtgcttaaaatctaaacttgaaccttgtgcctggtttataaatttacaagaaactgcaaagaaccacagactagtttttaatatcaagtttccatacaaaattgtccaagaatttatttgcaataccttacatgtgaactgaaataaactttgcaaactacaattatactaaagttttatactgaaaattcaaatcagcttactcataatctccagatagctcttccatcattattttaattaagtattacatt

SEQ ID NO: 289 - DNA, 566 bp, Homo sapiens
ttttttttttgcaagtcttttttttttttttaataaaaccaacataacagaatgtagaaatctaaacgaacatttcttcctcaaagtagttacatccttagctccaacaaaactactattgttggagacttatttagaactcctgtttgaggaaaggccttaaaagggggtttatgagccacattagaaaatacccttctaaactttgggctgtttaaaaacagaaaatccatactcagaggatgacaccgagaaaattaaaaaggtgctgcagctctcacggaggttccctaaagacctctagcaagttctgagcaacagcatcaccattggagaaacgtgtagcctcccaggacagccactttccatgggacggcattcatttggatagaaaagttctgctgtctgtttaaaaagaaaaaagaaaaaaaaaaaaatcagccacactcctttatagtcacacttgcatttgattaaaaaaaaaaacaacaacaacaacactcacacgtggttcttgtatgaattctaattaagagacattatattcagaattatagcactcatag

SEQ ID NO: 290 - DNA, 400 bp, Homo sapiens
ttattgttttttaaaaatacaattttgaaatttattgttgaaaatggacacatggaacaaaccaaaccttgttttatcatgtaattttcagaaaatatgtgatccataaagattaaaagaaagttgtattaagtctggcagctttagtattaacttgaaataaaatatggcaagctttccacgtcctcctttatttccacaatccatatgtacgagctagattccagtcagaacttccacaaatacttcactctttggtagcagcggttataaattacgcctttgctaatttgcgttgttcccaaccaggagaaacattaccacaaaaaaagtcagtttcatcctgcagtgttcccgcagcaaccatattaaagctgaagaataaagctcctttgtagta

SEQ ID NO: 291 - DNA, 517 bp, Homo sapiens
ttttttcacaattaacatttattgaccacattcataacagaaactcacccacattcacatgaactttgctacaaccaagaatcacctgatgagaaatcatttgggttgaatcctgggtgtggattctgttctgagaagacagcgactgtcacagacgcctcctgattggtggactctcaaagatcttgatcgtgacacatttttgtggctgttcttgacagtagctgaagattccaacttcaaaccccaaaacactggcgaatggccatgatgaccctcgggatggcctggaggagggtcaggaggccgaggggcagcaaacgcgctgcaggagccggtagctggtcctggtagggggcctggagctgctggaacttggacaacaggcactcatcaccgcagatccgccagcagttgtgccagcagcatgcatccagcaggggtgctgctttcggggtctcagggacagagggacccagtaaggcagtgctgcttccaccctggacacaggcaggcg

SEQ ID NO: 292 - DNA, 1056 bp, Homo sapiens
  misc_feature (376)..(376): n is a, c, g, or t
  misc_feature (432)..(432): n is a, c, g, or t
  misc_feature (993)..(994): n is a, c, g, or t
  misc_feature (1000)..(1002): n is a, c, g, or t
  misc_feature (1004)..(1005): n is a, c, g, or t
  misc_feature (1007)..(1010): n is a, c, g, or t
  misc_feature (1014)..(1014): n is a, c, g, or t
  misc_feature (1016)..(1017): n is a, c, g, or t
tttatgaggagcctcaaaaaatagaagtggccttggtagggaaggaatgtcgtgattctgagtacagtatggcaaattcttttgcctcagtttccctaactccatccagtgcatatgaaaatgtctatgtgcgtacaaggtaggtctggactaagctctggccctccggttgttttcccattgcgggagcctaagccagggtgcccaggactcctgtgtggctggtgggcctgatgcccacagctgatgattcaggaaggaggggcctggagtctgctgcagactctcccgccccctacagcccaaaccgggcactgcagcaatgaggtggtcagtccagggagaggtccgacaagttctcggcacaatgctgcangaagtcaaagtcaggcacggagaagggcacgcgggaccactttttggcctggatcncgccctgaggggtctccagcagcatgctgcggactttgagcactggcagcttcactgacttgtagatcatctgcagaccccaaacctcccacaggtcctgcagctgatgacacccccaggcttccagtccctgaagacttgttgatgaccacagatccctggagacatatattagtccggaagtgggggtcacatggaactgtggtgccttctctcttccaggtgcttcatgtgccccaccacctgcagttgatcaaaatattgcatgctctatgtgatgttgcctggtttttccctgtgttcttgggcccccccttgtgaagggatcctggaaaaacccgattgtgcgggcatcgcgggggatattttgcaaaaaacctatgcttatatatgtttcgtctgtgtatacatctcttatactcggttctatagttacaaacgtaatccttgttggcgtcgctcgtgctgcatgtatatatggtaaaactctatactcctatgtgtggttgcacctccttcaccttgtcaaatagggtttaattgaattaattttttgtcttnnaagggnnntnntnnnnccananncgacgcactagtacctggggctatatcatccggtgccgg

SEQ ID NO: 293 - DNA, 580 bp, Homo sapiens
  misc_feature (570)..(570): n is a, c, g, or t
ttttttttacacaaaatactatgatttcattagcatccacatatgtatcattttccacaacattttacaattctcttgtttcacagggaaggtgaactaattataatgaaatatcagtaatgtatcttaaataagtaacatgttgctggaaaaaatttaagttaaaatgcactacataatagtgcagaaacaaagtgcaggtggcaattttaagacatgaaaacaatgctgaatcagtagtgtttggagtgatacattttgcccatttttggccagtcctagaacagtactcaccacaagctgcatgccaaatatgaactaatgaggctaaaacactgaagaccaaatagaaccactctagagtctgtttcacaatgagatactcctccccgttctggaaacagcgatctgctgtagttcctatcctcctgtggcacctatccctgctacagtacctataaccagatgtcctccatcatccagcctccaggacaagtggtgctcagtgagtcacaacctgaggaacagctgctggttaccgatttgtattcctgtatatactcgacttgngtagccagga

SEQ ID NO: 294 - DNA, 561 bp, Homo sapiens
  misc_feature (534)..(534): n is a, c, g, or t
tttttttttcaaattttattttttgtacttttattgaaaaggtacatttaaaaaaatacacagacattttaccatttacaggttgcagatatagatgctctaaaagagtccactctattttgttgttctatgataactcttgcccctgatatcacaaacattccagtcttgttgatatcggcttaaaaaggggggcatgggagcatgacctgcaatatattcagcgaacagaaagacaaattgttcaattataaatttttttatcttctgtacattattgcattagggagccacaaaattatgtagcatcattacaaatgaaaacaggttaaaaatgaagaagatacttatatagaaatacatggattcattgtcttcttgcagaatgcacaagaggtgcaaaaatgtgcaatttaggaagctctttttctgtttgtatacgtttgcttagcaacacaaaccagtgaggaagctacaaaataagttaaacaaaaatagcaaacaggtagtaattatagctatgttatatggctntctatttcatttaaatatctccaaata

SEQ ID NO: 295 - DNA, 533 bp, Homo sapiens
  misc_feature (498)..(498): n is a, c, g, or t
ttttcatttagtgcaagtagcaagtttatttcctttgatatagaattaacagagtaatgatgcccaaatgaggtaatattacatttgcttaggaaaactttccttgaaacacttatttagatctttgttaaagttattgattgtcagatcagagaaattgcaatcccaagtttattcataaaataaaaaaagttgttactttggaaatttcaaaatggcaattttatctcagagtcataattacaaggggaaaaatactctcttagccaagatcaagaatttcggcagcactgcaattctgtttacatccacgttacacaaaagcacatgcatttggcaaagagagtgcatacattcttattgcatcatttttcgttatgtgctcaattgccttatggtcccctagagggtctacttaacatgaattcaacaatgatgataatggggtcaccagtcatttccttacatatatagctctgatgtattcaattacatgtntttgatgttgtgctggtagtatatagatcccaatt

SEQ ID NO: 296 - DNA, 453 bp, Homo sapiens
ttttaaatgttcccagaaatagtgtatttgtttgtttacatcttcagaggcaacggaccactaaatgttttgggtttaaaaacaatgtttaaaattatcaaatggtaaaagacatcatgaccaaagcttgggagatcagtgcctgtgtggagacccttcccaaaacagcttcaggcaaaggaagcctggccccctccgtgggccgagtgagatgcttgtgtgtgcagcaggtgcctctgtggtgctgggtgaagagcagacgacagggggggctttagaagtctccctggggcctacgctcccaagggcagactgctctcctccccatcccccaacagaggggcctgtgctctaagcactgcccgctgagcccagagctgccctccaggcacccgccgtcccaacggcccccatttacttgtctctctcttgtcaccagatagacagacaaag

SEQ ID NO: 297 - DNA, 510 bp, Homo sapiens
tttttttttttagaaaagatttttatctttaattagagtttgtagtatacacttaactttctgtaatctgcagtgatgaatctctatgtaaacattcagaaaaagagcgaatactgtgtcatgacttatgaactataaattttgtccctgattactagtcaagaacagttttatacatttattaacaactactttcctccacttaacaacagctcttaaataacaaaataaattatcagcatttccaaccacaaatttaagaattaaagtttaaaaaactggttagtttcataaatgcaagcagagtaataaatttcatatatgttaattgcagttacttatgttctttgagtgaagtaacacaaagatttttcccttccccttttggcaagttcacaaaattcatgaaaagtcttcacctttttcttttttgcttaatttcttttttgcatctcagctgaacacaacagacaatagctggggttattagcgagacatgataaaagaaaa

SEQ ID NO: 298 - DNA, 2011 bp, Homo sapiens
gccacacggtctttgagctgagtcgaggtggaccctttgaacgcagtcgccctacagccgctgattccccccgcatcgcctcccgtggaagcccaggcccgcttcgcagctttctccctttgtctcataaccatgtccaccaacgagaatgctaatacaccagctgcccgtcttcacagattcaagaacaagggaaaagacagtacagaaatgaggcgtcgcagaatagaggtcaatgtggagctgaggaaagctaagaaggatgaccagatgctgaagaggagaaatgtaagctcatttcctgatgatgctacttctccgctgcaggaaaaccgcaacaaccagggcactgtaaattggtctgttgatgacattgtcaaaggcataaatagcagcaatgtggaaaatcagctccaagctactcaagctgccaggaaactactttccagagaaaaacagccccccatagacaacataatccgggctggtttgattccgaaatttgtgtccttcttgggcagaactgattgtagtcccattcagtttgaatctgcttgggcactcactaacattgcttctgggacatcagaacaaaccaaggctgtggtagatggaggtgccatcccagcattcatttctctgttggcatctccccatgctcacatcagtgaacaagctgtctgggctctaggaaacattgcaggtgatggctcagtgttccgagacttggttattaagtacggtgcagttgacccactgttggctctccttgcagttcctgatatgtcatctttagcatgtggctacttacgtaatcttacctggacactttctaatctttgccgcaacaagaatcctgcacccccgatagatgctgttgagcagattcttcctaccttagttcggctcctgcatcatgatgatccagaagtattagcagatacctgctgggctatttcctaccttactgatggtccaaatgaacgaattggcatggtggtgaaaacaggagttgtgccccaacttgtgaagcttctaggagcttctgaattgccaattgtgactcctgccctaagagccatagggaatattgtcactggtacagatgaacagactcaggttgtgattgatgcaggagcactcgccgtctttcccagcctgctcaccaaccccaaaactaacattcagaaggaagctacgtggacaatgtcaaacatcacagccggccgccaggaccagatacagcaagttgtgaatcatggattagtcccattccttgtcagtgttctctctaaggcagattttaagacacaaaaggaagctgtgtgggccgtgaccaactataccagtggtggaacagttgaacagattgtgtaccttgttcactgtggcataatagaaccgttgatgaacctcttaactgcaaaagataccaagattattctggttatcctggatgccatttcaaatatctttcaggctgctgagaaactaggtgaaactgagaaacttagtataatgattgaagaatgtggaggcttagacaaaattgaagctctacaaaaccatgaaaatgagtctgtgtataaggcttcgttaagcttaattgagaagtatttctctgtagaggaagaggaagatcaaaacgttgtaccagaaactacctctgaaggctacactttccaagttcaggatggggctcctgggacctttaacttttagatcatgtagctgagacataaatttgttgtgtactacgtttggtattttgtcttattgtttctctactaagaactctttcttaaatgtggtttgttactgtagcactttttacactgaaactatacttgaacagttccaactgtacatacatactgtatgaagcttgtcctctgactaggtttctaatttctatgtggaatttcctatcttgcagcatcctgtaaataaacattcaagtccacccttttcttgacttcaaaaaaaaaaaaaaaaaaaaaaaaaaaaaaaa

1. An array comprising a substrate and a set of addressable elements, wherein each addressable element comprises (i) a polynucleotide that specifically binds to a target molecule, (ii) a polypeptide that specifically binds to a target molecule, or (iii) a combination of (i) and (ii), wherein the target molecule is selected from the group consisting of the target molecules listed in Table 1, wherein the array comprises less than 38,500 addressable elements, wherein, when the array is specific for the target molecules in Table 3, the array is specific for at least one target molecule listed in Table 1 that is not listed in Table 3.

2. The array of claim 1, comprising less than about 33,000 addressable elements.

3. The array of claim 2, comprising less than about 14,500 addressable elements.

4. The array of claim 3, comprising less than about 8400 addressable elements.

5. The array of claim 4, comprising less than about 5000 addressable elements.

6. The array of claim 1, wherein the set of addressable elements is specific for one or more of the target molecules of any of Groups 1 to 4, or a combination thereof.

7. The array of claim 1, wherein the set consists essentially of addressable elements specific for the target molecules of Table 1 or of any of Groups 1 to 4, or a combination thereof.

8. An array comprising a substrate and a set of addressable elements, wherein each addressable element comprises (i) a polynucleotide that specifically binds to a target molecule, (ii) a polypeptide that specifically binds to a target molecule, or (iii) a combination of (i) and (ii), wherein the target molecule is selected from the group consisting of the target molecules listed in Table 2, wherein the array comprises less than 38,500 addressable elements, wherein, when the array is specific for the target molecules in Table 3, the array is specific for at least one target molecule listed in Table 2 that is not listed in Table 3.

9. The array of claim 8, comprising less than about 33,000 addressable elements.

10. The array of claim 9, comprising less than about 14,500 addressable elements.

11. The array of claim 10, comprising less than about 8400 addressable elements.

12. The array of claim 11, comprising less than about 5000 addressable elements.

13. The array of claim 8, wherein the set of addressable elements is specific for one or more of the molecules of any of Groups 5 to 9, or a combination thereof.

14. The array of claim 8, wherein the set consists of addressable elements specific for one or more of the target molecules of Table 2 or of any of Groups 5 to 9, or a combination thereof.

15. A kit comprising a set of user instructions and (i) a set of polynucleotides, (ii) a set of polypeptides, or (iii) a combination of (i) and (ii), wherein the set of polynucleotides is specific for one or more of the target molecules listed in Table 1, wherein the set of polypeptides is specific for one or more of the target molecules listed in Table 1, wherein the kit is specific for less than 38,500 target molecules, wherein, when the kit is specific for the target molecules in Table 3, the kit is specific for at least one target molecule listed in Table 1 that is not listed in Table 3.

16. A kit comprising a set of user instructions and (i) a set of polynucleotides, (ii) a set of polypeptides, or (iii) a combination thereof, wherein the set of polynucleotides is specific for one or more of the target molecules listed in any of Table 2, wherein the set of polypeptides is specific for one or more of the target molecules listed in any of Table 2, wherein the kit is specific for less than 38,500 target molecules, wherein, when the kit is specific for the target molecules in Table 3, the kit is specific for at least one target molecule listed in Table 2 that is not listed in Table 3.

17. A method of characterizing a tumor or cancer in a subject comprising (i) detecting the expression levels of a set of target molecules in the subject, wherein the set of target molecules comprises one or more of the target molecules listed in Table 1 or 2, or any of Groups 1 to 9, or a combination thereof, wherein the expression levels are detected with the array of claim 1.

18. The method of claim 17, wherein the set of target molecules consists of all the target molecules of any of Groups 1 to 9 or a combination thereof.

19. A method of characterizing a tumor or cancer in a subject comprising (i) detecting the expression levels of a set of target molecules in the subject, wherein the set of target molecules consists of all the target molecules listed in Table 1 or 2, or any of Groups 1 to 9, or a combination thereof, and (ii) comparing the expression levels of the set of target molecules to a control set of expression levels.

20. The array of claim 17, wherein the method characterizes the tumor or cancer in terms of metastatic capacity, tumor stage, nodal involvement, regional metastasis, distant metastasis, tumor size, and/or sex hormone receptor status.

21. The array of claim 17, further comprising predicting whether the subject will survive from the cancer.

22. The array of claim 17, further comprising determining a treatment for the subject.

23. The array of claim 17, wherein the cancer is an epithelial cancer.

24. The method of claim 23, wherein the cancer is breast cancer.

25. The array of claim 17, wherein the subject is Swedish, Dutch, or Singaporean.

26-27. (canceled)

28. A method for treating cancer in a subject comprising:
(a) obtaining a sample from the subject;
(b) preparing the sample and applying the sample to the array of claim 1;
(c) determining the expression levels of a set of target molecules, wherein the set of target molecules comprises one or more of the target molecules listed in Table 1 or 2; and
(d) administering to the subject a compound with anti-cancer activity based on the expression levels determined in (c).

29. A method for treating cancer in a subject comprising:
(a) obtaining a sample from the subject;
(b) preparing the sample and applying the sample to the array of claim 1;
(c) determining the expression levels of a set of target molecules, wherein the set of target molecules consists of the target molecules listed in any of Table 1 or 2, or a combination thereof; and
(d) administering to the subject a compound with anti-cancer activity based on the expression levels determined in (c).

30. A method for treating cancer in a subject comprising:
(a) obtaining a sample from the subject;
(b) preparing the sample and applying the sample to the kit of claim 15;
(c) determining the expression levels of a set of target molecules, wherein the set of target molecules comprises one or more of the target molecules listed in Table 1 or 2; and
(d) administering to the subject a compound with anti-cancer activity based on the expression levels determined in (c).
